(19) United States
(12) Patent Application Publication
(10) Pub. No.: US 2026/0159823 A1
(43) Pub. Date: Jun. 11, 2026

(54) TYPE II CAS PROTEIN, CRISPR-CAS SYSTEM AND USES THEREOF

(71) Applicant: GENEDITBIO LIMITED, Hong Kong (CN)

(72) Inventor: Bang Wang, Hong Kong (CN)

(21) Appl. No.: 19/540,631

(22) Filed: Feb. 14, 2026

Related U.S. Application Data
(63) Continuation of application No. PCT/CN2024/112724, filed on Aug. 16, 2024.

(30) Foreign Application Priority Data
Aug. 16, 2023 (WO) PCT/CN2023/113355
Sep. 4, 2023 (WO) PCT/CN2023/116757
Dec. 6, 2023 (WO) PCT/CN2023/136724
May 6, 2024 (WO) PCT/CN2024/091198
May 6, 2024 (WO) PCT/CN2024/091203
May 6, 2024 (WO) PCT/CN2024/091211

(51) Int. Cl. C12N 9/22; C12N 15/11; C12N 15/90

(52) U.S. Cl. CPC C12N 9/226; C12N 15/111; C12N 15/90; C12N 2310/20

(57) ABSTRACT

The current disclosure pertains to Type II Cas proteins, CRISPR-Cas systems, and their various applications. The Type II Cas proteins outlined in this disclosure broaden the utility of CRISPR-Cas systems for targeting or modifying genes.

### CROSS-REFERENCE TOO RELATED APPLICATIONS

[0001] This application is a continuation application of PCT/CN2024/112724, filed on Aug. 16, 2024, which claims priority to PCT application PCT/CN2023/113355, filed on Aug. 16, 2023, PCT application PCT/CN2023/116757, filed on Sep. 4, 2023, PCT application PCT/CN2023/136724, filed on Dec. 6, 2023, PCT application PCT/CN2024/091203, filed on May 6, 2024, PCT application PCT/CN2024/091198, filed on May 6, 2024, and PCT application PCT/CN2024/091211, filed on May 6, 2024, the entire contents of which are hereby incorporated by reference.

### REFERENCE TO SEQUENCE LISTING

[0002] The instant application contains a Sequence Listing as an XML file entitled “BSP26410440US-CA-SEQ” created on Feb. 11, 2026 and having a size of 1,597,127 bytes. The Sequence Listing is hereby incorporated by reference.

### TECHNICAL FIELD

[0003] The present disclosure relates to type II Cas protein, CRISPR-Cas system and uses thereof. Particularly, the type II Cas protein and CRISPR-Cas system are used for gene targeting or gene editing.

### BACKGROUND

[0004] Targeted genome editing or modification is rapidly becoming an important tool for basic and applied research, with clustered regularly interspaced short palindromic repeats and CRISPR-associated proteins (CRISPR-Cas) system showing the most promising due to the ease of altering target specificity by engineering associated guide RNAs. Recent advances in genome sequencing techniques and analysis methods have significantly accelerated the ability to catalog and map genetic factors associated with a diverse range of biological functions and diseases. Precise genome targeting technologies are needed to enable systematic reverse engineering of causal genetic variations by allowing selective perturbation of individual genetic elements, as well as to advance synthetic biology, biotechnological, and medical applications.

[0005] Various of CRISPR-Cas system had been explored and different CRISPR-Cas systems present different characteristics, like as CRISPR-Cas9 system which belongs to the class 2 CRISPR-Cas system, has been harnessed for genome editing and holds tremendous promise for biomedical research.

### SUMMARY

[0006] This invention provides an engineered, non-naturally occurring Type II CRISPR-associated (Cas) protein having a sequence identity of at least 70% to the amino acid sequence of any one of SEQ ID NOs: 1-71, or a variant thereof. In some embodiments, the Cas protein having a sequence identity of at least 75%, 80%, 85%, 90%, 92%, 95%, 98%, 99% or 100% to the amino acid sequence of any one of SEQ ID NOs: 1-71.

[0007] This invention also provides an engineered, non-naturally occurring Type II CRISPR-associated (Cas) protein, wherein the Cas protein has a sequence identity of at least 70%, 75%, 80%, 85%, 90%, 92%, 95%, 98%, 99%, or 100% to the amino acid sequence of any one of SEQ ID NOs: 1-71, with the exception of the amino acid “M” at position 1 of the sequence.

[0008] In some embodiments, the Cas protein further comprises an effector domain (or functional domain). Such effector domains can have one or more types of enzymatic activities, including polymerase activity, ligase activity, reverse transcriptase activity, deaminase activity, replication activity, or proofreading activity. In some embodiment, the effector domains domain comprises a nuclease, a nickase, a deaminase, a reverse transcriptase, a recombinase, a methyltransferase, a methylase, an acetylase, an acetyltransferase, a transcriptional activator, a transcriptional repressor domain, a cryptochrome, a light inducible/controllable domain, or a chemically inducible/controllable domain.

[0009] In some embodiments, the Cas protein further comprises one or more of a nuclear localization signal sequence, a nuclear export signal sequence, a cell penetrating peptide sequence, an affinity tag. the type II Cas protein comprises one or more nuclear localization signal(s) NLS(s). The NLS(s) can locate at the end or other portion of the peptide. The NLS(s) located each end or other portion of the Cas9 amino acid sequence can be same or not. In some embodiments, the NLS of the N-terminal end and the NLS of the C-terminal end are the same. In some embodiments, the NLS of the N-terminal end and the NLS of the C-terminal end are different. In some embodiments, the N-terminal end of the Cas9 amino acid sequence comprising one NLS and the C-terminal end of the Cas9 amino acid sequence comprising one NLS. The amino acid sequence of NLS fused to the N-terminal end and/or the C-terminal end of the Cas9 amino acid sequence respectively. NLS maybe an SV40 (simian virus 40) NLS, c-Myc NLS, or other suitable monopartite NLS. The NLS may be fused to an N-terminal and/or a C-terminal of the Cas protein. In some embodiments, an affinity tag (such as GST, FLAG or hexahistidine sequences) is utilized for purification of the Cas protein by affinity chromatography. In some embodiments, the amino acid sequence of C-terminal NLS is set forth in SEQ ID NO: 881 or 882. In some embodiments, the amino acid sequence of the C-terminal FLAG sequence is set forth in SEQ ID NO: 883. Other available sequences and different combinations can also be chosen for the NLSs sequences and FLAG sequence.

[0010] In some embodiments, the Cas protein, the Cas protein comprises an amino acid sequence having at least 70%, 71%, 72%, 73%, 74%, 75%, 76%, 77%, 78%, 79%, 80%, 81%, 82%, 83%, 84%, 85%, 86%, 87%, 88%, 89%, 90%, 91%, 92%, 93%, 94%, 95%, 96%, 97%, 98%, 99%, or 100% sequence identity to the amino acid sequence of any one of SEQ ID NOs: 1-71.

[0011] In some preferred embodiments, the Cas protein has a sequence identity of at least 70%, 71%, 72%, 73%, 74%, 75%, 76%, 77%, 78%, 79%, 80%, 81%, 82%, 83%, 84%, 85%, 86%, 87%, 88%, 89%, 90%, 91%, 92%, 93%, 94%, 95%, 96%, 97%, 98%, 99%, or 100% to the amino acid sequence of any one of SEQ ID NOs: 9, 12, 19, 21, 22, 24, 25, 27, 29, 30, 31, 36, 37, 38, 43, 44, 51, 56, 59, 60, and 68). In some other preferred embodiments, the Cas protein has a sequence identity of at least 70%, 71%, 72%, 73%, 74%, 75%, 76%, 77%, 78%, 79%, 80%, 81%, 82%, 83%, 84%, 85%, 86%, 87%, 88%, 89%, 90%, 91%, 92%, 93%, 94%, 95%, 96%, 97%, 98%, 99%, or 100% to the amino acid sequence of any one of SEQ ID NOs: 9, 12, 19, 21, 22, 24, 25, 27, 29, 30, 31, 36, 37, 38, 43, 44, 51, 56, 59, 60, and 68, with the exception of the amino acid “M” at position 1 of the sequence.

[0012] One of the key elements of the CRISPR-Cas system associated modification process is the Protospacer Adjacent Motif (PAM), a short DNA sequence immediately adjacent to the target DNA sequence. The PAM sequence is essential for Cas protein binding and cleavage activity, ensuring that only the intended DNA sequences are targeted for editing. The ability of the Cas protein to recognize these specific PAM sequences is due to its unique structural features and binding interactions with the DNA. Each PAM sequence provides a distinct motif that the Cas protein can identify, ensuring accurate and efficient targeting. For example, the NRRANH sequence may offer a specific arrangement of nucleotides that the Cas protein can bind to with high affinity. These diverse range of PAM sequences expands the potential applications of the CRISPR-Cas system. It enables researchers and scientists to target a wider variety of DNA sequences for editing, increasing the versatility and effectiveness of this powerful gene-editing tool. Additionally, understanding these PAM sequences can aid in the development of more advanced Cas proteins with even greater targeting capabilities, further advancing the field of gene editing and its potential benefits for research, medicine, and biotechnology. The Cas protein, as disclosed in this invention, exhibits a unique capability to recognize a diverse range of PAM sequences. These sequences include NRRANH, NRHACT, NRAAR, NNNCCY, NNRYYYY, NGG, NNNNCAA, NRNACN, NNGR, NGGNR, NNNCCH, NRRAAG, NRHRAC, NRYART, NRHACC, NRAAR, NRNVHH, YMACAW, NAHAA, NRHAYY, or NGGHA. This specific recognition of these Cas proteins allows for greater flexibility in selecting target DNA sequences for editing.

[0013] In some embodiments, the Cas protein, as disclosed in this invention, is capable of recognizing at least one protospacer adjacent motif (PAM) having or comprising a sequence of: NRRANH, NRHACT, NRAAR, NNNCCY, NNRYYYY, NGG, NNNNCAA, NRNACN, NNGR, NGGNR, NNNCCH, NRRAAG, NRHRAC, NRYART, NRHACC, NRAAR, NRNVHH, YMACAW, NAHAA, NRHAYY, or NGGHA. In some embodiments, the Cas protein has a sequence identity of at least 70%, 71%, 72%, 73%, 74%, 75%, 76%, 77%, 78%, 79%, 80%, 81%, 82%, 83%, 84%, 85%, 86%, 87%, 88%, 89%, 90%, 91%, 92%, 93%, 94%, 95%, 96%, 97%, 98%, 99%, or 100% to the amino acid sequence of SEQ ID NO: 9, and is capable of recognizing a protospacer adjacent motif (PAM) having a sequence of: NRRANH. In some embodiments, the Cas protein has a sequence identity of at least 70%, 71%, 72%, 73%, 74%, 75%, 76%, 77%, 78%, 79%, 80%, 81%, 82%, 83%, 84%, 85%, 86%, 87%, 88%, 89%, 90%, 91%, 92%, 93%, 94%, 95%, 96%, 97%, 98%, 99%, or 100% to the amino acid sequence of SEQ ID NO: 12, and is capable of recognizing a protospacer adjacent motif (PAM) having a sequence of: NRHACT. In some embodiments, the Cas protein has a sequence identity of at least 70%, 71%, 72%, 73%, 74%, 75%, 76%, 77%, 78%, 79%, 80%, 81%, 82%, 83%, 84%, 85%, 86%, 87%, 88%, 89%, 90%, 91%, 92%, 93%, 94%, 95%, 96%, 97%, 98%, 99%, or 100% to the amino acid sequence of SEQ ID NO: 19, and is capable of recognizing a protospacer adjacent motif (PAM) having a sequence of: NRAAR. In some embodiments, the Cas protein has a sequence identity of at least 70%, 71%, 72%, 73%, 74%, 75%, 76%, 77%, 78%, 79%, 80%, 81%, 82%, 83%, 84%, 85%, 86%, 87%, 88%, 89%, 90%, 91%, 92%, 93%, 94%, 95%, 96%, 97%, 98%, 99%, or 100% to the amino acid sequence of SEQ ID NO: 21, and is capable of recognizing a protospacer adjacent motif (PAM) having a sequence of: NNNCCY In some embodiments, the Cas protein has a sequence identity of at least 70%, 71%, 72%, 73%, 74%, 75%, 76%, 77%, 78%, 79%, 80%, 81%, 82%, 83%, 84%, 85%, 86%, 87%, 88%, 89%, 90%, 91%, 92%, 93%, 94%, 95%, 96%, 97%, 98%, 99%, or 100% to the amino acid sequence of SEQ ID NO: 22, and is capable of recognizing a protospacer adjacent motif (PAM) having a sequence of: NNRYYYY In some embodiments, the Cas protein has a sequence identity of at least 70%, 71%, 72%, 73%, 74%, 75%, 76%, 77%, 78%, 79%, 80%, 81%, 82%, 83%, 84%, 85%, 86%, 87%, 88%, 89%, 90%, 91%, 92%, 93%, 94%, 95%, 96%, 97%, 98%, 99%, or 100% to the amino acid sequence of SEQ ID NO: 24, and is capable of recognizing a protospacer adjacent motif (PAM) having a sequence of: NGG. In some embodiments, the Cas protein has a sequence identity of at least 70%, 71%, 72%, 73%, 74%, 75%, 76%, 77%, 78%, 79%, 80%, 81%, 82%, 83%, 84%, 85%, 86%, 87%, 88%, 89%, 90%, 91%, 92%, 93%, 94%, 95%, 96%, 97%, 98%, 99%, or 100% to the amino acid sequence of SEQ ID NO: 25, and is capable of recognizing a protospacer adjacent motif (PAM) having a sequence of: NNNNCAA. In some embodiments, the Cas protein has a sequence identity of at least 70%, 71%, 72%, 73%, 74%, 75%, 76%, 77%, 78%, 79%, 80%, 81%, 82%, 83%, 84%, 85%, 86%, 87%, 88%, 89%, 90%, 91%, 92%, 93%, 94%, 95%, 96%, 97%, 98%, 99%, or 100% to the amino acid sequence of SEQ ID NO: 27, and is capable of recognizing a protospacer adjacent motif (PAM) having a sequence of: NRNACN. In some embodiments, the Cas protein has a sequence identity of at least 70%, 71%, 72%, 73%, 74%, 75%, 76%, 77%, 78%, 79%, 80%, 81%, 82%, 83%, 84%, 85%, 86%, 87%, 88%, 89%, 90%, 91%, 92%, 93%, 94%, 95%, 96%, 97%, 98%, 99%, or 100% to the amino acid sequence of SEQ ID NO: 29, and is capable of recognizing a protospacer adjacent motif (PAM) having a sequence of: NNGR. In some embodiments, the Cas protein has a sequence identity of at least 70%, 71%, 72%, 73%, 74%, 75%, 76%, 77%, 78%, 79%, 80%, 81%, 82%, 83%, 84%, 85%, 86%, 87%, 88%, 89%, 90%, 91%, 92%, 93%, 94%, 95%, 96%, 97%, 98%, 99%, or 100% to the amino acid sequence of SEQ ID NO: 30, and is capable of recognizing a protospacer adjacent motif (PAM) having a sequence of: NGGNR. In some embodiments, the Cas protein has a sequence identity of at least 70%, 71%, 72%, 73%, 74%, 75%, 76%, 77%, 78%, 79%, 80%, 81%, 82%, 83%, 84%, 85%, 86%, 87%, 88%, 89%, 90%, 91%, 92%, 93%, 94%, 95%, 96%, 97%, 98%, 99%, or 100% to the amino acid sequence of SEQ ID NO: 31, and is capable of recognizing a protospacer adjacent motif (PAM) having a sequence of: NNNCCH. In some embodiments, the Cas protein has a sequence identity of at least 70%, 71%, 72%, 73%, 74%, 75%, 76%, 77%, 78%, 79%, 80%, 81%, 82%, 83%, 84%, 85%, 86%, 87%, 88%, 89%, 90%, 91%, 92%, 93%, 94%, 95%, 96%, 97%, 98%, 99%, or 100% to the amino acid sequence of SEQ ID NO: 36, and is capable of recognizing a protospacer adjacent motif (PAM) having a sequence of: NRRAAG. In some embodiments, the Cas protein has a sequence identity of at least 70%, 71%, 72%, 73%, 74%, 75%, 76%, 77%, 78%, 79%, 80%, 81%, 82%, 83%, 84%, 85%, 86%, 87%, 88%, 89%, 90%, 91%, 92%, 93%, 94%, 95%, 96%, 97%, 98%, 99%, or 100% to the amino acid sequence of SEQ ID NO: 37, and is capable of recognizing a protospacer adjacent motif (PAM) having a sequence of: NRHRAC. In some embodiments, the Cas protein has a sequence identity of at least 70%, 71%, 72%, 73%, 74%, 75%, 76%, 77%, 78%, 79%, 80%, 81%, 82%, 83%, 84%, 85%, 86%, 87%, 88%, 89%, 90%, 91%, 92%, 93%, 94%, 95%, 96%, 97%, 98%, 99%, or 100% to the amino acid sequence of SEQ ID NO: 38, and is capable of recognizing a protospacer adjacent motif (PAM) having a sequence of: NRYART. In some embodiments, the Cas protein has a sequence identity of at least 70%, 71%, 72%, 73%, 74%, 75%, 76%, 77%, 78%, 79%, 80%, 81%, 82%, 83%, 84%, 85%, 86%, 87%, 88%, 89%, 90%, 91%, 92%, 93%, 94%, 95%, 96%, 97%, 98%, 99%, or 100% to the amino acid sequence of SEQ ID NO: 43, and is capable of recognizing a protospacer adjacent motif (PAM) having a sequence of: NRHACC. In some embodiments, the Cas protein has a sequence identity of at least 70%, 71%, 72%, 73%, 74%, 75%, 76%, 77%, 78%, 79%, 80%, 81%, 82%, 83%, 84%, 85%, 86%, 87%, 88%, 89%, 90%, 91%, 92%, 93%, 94%, 95%, 96%, 97%, 98%, 99%, or 100% to the amino acid sequence of SEQ ID NO: 44, and is capable of recognizing a protospacer adjacent motif (PAM) having a sequence of: NRAAR. In some embodiments, the Cas protein has a sequence identity of at least 70%, 71%, 72%, 73%, 74%, 75%, 76%, 77%, 78%, 79%, 80%, 81%, 82%, 83%, 84%, 85%, 86%, 87%, 88%, 89%, 90%, 91%, 92%, 93%, 94%, 95%, 96%, 97%, 98%, 99%, or 100% to the amino acid sequence of SEQ ID NO: 51, and is capable of recognizing a protospacer adjacent motif (PAM) having a sequence of: NRNVHH. In some embodiments, the Cas protein has a sequence identity of at least 70%, 71%, 72%, 73%, 74%, 75%, 76%, 77%, 78%, 79%, 80%, 81%, 82%, 83%, 84%, 85%, 86%, 87%, 88%, 89%, 90%, 91%, 92%, 93%, 94%, 95%, 96%, 97%, 98%, 99%, or 100% to the amino acid sequence of SEQ ID NO: 56, and is capable of recognizing a protospacer adjacent motif (PAM) having a sequence of: YMACAW. In some embodiments, the Cas protein has a sequence identity of at least 70%, 71%, 72%, 73%, 74%, 75%, 76%, 77%, 78%, 79%, 80%, 81%, 82%, 83%, 84%, 85%, 86%, 87%, 88%, 89%, 90%, 91%, 92%, 93%, 94%, 95%, 96%, 97%, 98%, 99%, or 100% to the amino acid sequence of SEQ ID NO: 59, and is capable of recognizing a protospacer adjacent motif (PAM) having a sequence of: NAHAA. In some embodiments, the Cas protein has a sequence identity of at least 70%, 71%, 72%, 73%, 74%, 75%, 76%, 77%, 78%, 79%, 80%, 81%, 82%, 83%, 84%, 85%, 86%, 87%, 88%, 89%, 90%, 91%, 92%, 93%, 94%, 95%, 96%, 97%, 98%, 99%, or 100% to the amino acid sequence of SEQ ID NO: 60, and is capable of recognizing a protospacer adjacent motif (PAM) having a sequence of: NRHAYY. In some embodiments, the Cas protein has a sequence identity of at least 70%, 71%, 72%, 73%, 74%, 75%, 76%, 77%, 78%, 79%, 80%, 81%, 82%, 83%, 84%, 85%, 86%, 87%, 88%, 89%, 90%, 91%, 92%, 93%, 94%, 95%, 96%, 97%, 98%, 99%, or 100% to the amino acid sequence of SEQ ID NO: 68, and is capable of recognizing a protospacer adjacent motif (PAM) having a sequence of: NGGHA.

[0014] In some embodiments, the Cas protein is a nickase or dead Cas protein. The DNA cleavage domain of an active Cas protein in this invention include two subdomains, the HNH nuclease subdomain and the RuvC subdomain. Mutations within these subdomains can silence the nuclease activity of the Cas protein. In some embodiments, Cas protein has a sequence identity of at least 70%, 71%, 72%, 73%, 74%, 75%, 76%, 77%, 78%, 79%, 80%, 81%, 82%, 83%, 84%, 85%, 86%, 87%, 88%, 89%, 90%, 91%, 92%, 93%, 94%, 95%, 96%, 97%, 98%, 99%, or 100% to the amino acid sequence of SEQ ID NO: 9, and includes a mutation at residue D11 or H859; or has a sequence identity of at least 70%, 71%, 72%, 73%, 74%, 75%, 76%, 77%, 78%, 79%, 80%, 81%, 82%8, 83%, 84%, 85%, 86%, 87%, 88%, 89%, 90%, 91%, 92%, 93%, 94%, 95%, 96%, 97%, 98%, 99%, or 100% to the amino acid sequence of SEQ ID NO: 12, and includes a mutation at residue D10 or H862; or has a sequence identity of at least 70%, 71%, 72%, 73%, 74%, 75%, 76%, 77%, 78%, 79%, 80%, 81%, 82%, 83%, 84%, 85%, 86%, 87%, 88%, 89%, 90%, 91%, 92%, 93%, 94%, 95%, 96%, 97%, 98%, 99%, or 100% to the amino acid sequence of SEQ ID NO: 31, and includes a mutation at D12 or H903. In some embodiments, the Cas protein has a sequence identity of at least 70%, 71%, 72%, 73%, 74%, 75%, 76%, 77%, 78%, 79%, 80%, 81%, 82%, 83%, 84%, 85%, 86%, 87%, 88%, 89%, 90%, 91%, 92%, 93%, 94%, 95%, 96%, 97%, 98%, 99%, or 100% to the amino acid sequence of SEQ ID NO: 9, and includes a mutation at residue D11 or H859, with the exception of the amino acid “M” at position 1 of the sequence; or has a sequence identity of at least 70%, 71%, 72%, 73%, 74%, 75%, 76%, 77%, 78%, 79%, 80%, 81%, 82%, 83%, 84%, 85%, 86%, 87%, 88%, 89%, 90%, 91%, 92%, 93%, 94%, 95%, 96%, 97%, 98%, 99%, or 100% to the amino acid sequence of SEQ ID NO: 12, and includes a mutation at residue D10 or H862, with the exception of the amino acid “M” at position 1 of the sequence; or has a sequence identity of at least 70%, 71%, 72%, 73%, 74%, 75%, 76%, 77%, 78%, 79%, 80%, 81%, 82%, 83%, 84%, 85%, 86%, 87%, 88%, 89%, 90%, 91%, 92%, 93%, 94%, 95%, 96%, 97%, 98%, 99%, or 100% to the amino acid sequence of SEQ ID NO: 31, and includes a mutation at D12 or H903, with the exception of the amino acid “M” at position 1 of the sequence. In some embodiments, the mutation at residue D11 or H859 of SEQ ID NO: 9 is D11A or H859A; the mutation at residue D10 or H862 of SEQ ID NO: 12 is D10A or H862A; or the mutation at residue D12 or H903 of SEQ ID NO: 31 is D12A or H903A. In some embodiments, the Cas protein has a sequence identity of at least 70%, 71%, 72%, 73%, 74%, 75%, 76%, 77%, 78%, 79%, 80%, 81%, 82%, 83%, 84%, 85%, 86%, 87%, 88%, 89%, 90%, 91%, 92%, 93%, 94%, 95%, 96%, 97%, 98%, 99%, or 100% to the amino acid sequence of any one of SEQ ID NOs: 869-877.

[0015] This invention also provides an engineered, non-naturally occurring polynucleotide encoding the Type II CRISPR-associated (Cas) protein as disclosed in this invention.

[0016] In some embodiments, the polynucleotide encoding the Cas protein is operably linked to a promoter and is presented in a vector; optionally, the vector is selected from the group consisting of: a retroviral vector, a lentiviral vector, a phage vector, an adenoviral vector, an adeno-associated virus vector, a herpes simplex virus vector and a plasmid vector.

[0017] In some embodiments, the polynucleotide is a ribonucleotide sequence or a deoxyribonucleotide sequence, or analogs thereof, optionally, the polynucleotide is codon-optimized for expression in a cell of interest. In some embodiments, the polynucleotide is codon optimized for expression in a eukaryotic cell. In some embodiments, the eukaryotic cell is selected from the group consisting of: a plant cell, a fungal cell, a single cell eukaryotic organism, a mammalian cell, a reptile cell, an insect cell, an avian cell, a fish cell, a parasite cell, an arthropod cell, a cell of an invertebrate, a cell of a vertebrate, a rodent cell, a mouse cell, a rat cell, a primate cell, a non-human primate cell, and a human cell. In some embodiments, the cell is a mammalian cell, preferably a human cell. In some embodiments, the cell is a mammalian cell, preferably a human cell.

[0018] In some embodiments, the polynucleotide is an mRNA and further comprises a 5′ cap sequence and/or a poly-A tail sequence. In some embodiments of the present invention, the mRNA utilized may be modified to enhance its functional properties and stability. Specifically, in some embodiments, the modification process involves the substitution of uridine (represented by the letter “U”) with N1-Methylpseudouridine or pseudouridine. This substitution is designed to improve the mRNA's resistance to degradation by ribonucleases, potentially increasing its half-life and translational efficiency within the cell. The incorporation of N1-Methylpseudouridine or pseudouridine into the mRNA structure can also positively influence the immune response profile, as these modifications have been shown to reduce the immunogenicity of mRNA molecules when compared to their unmodified counterparts. This is particularly crucial for the development of mRNA-based therapeutics and vaccines, where minimizing adverse immune reactions is paramount.

[0019] In some embodiments, the polynucleotide in this invention is codon-optimized for expression in a eukaryotic cell; optionally, the eukaryotic cell is selected from the group consisting of: a plant cell, a fungal cell, a single-cell eukaryotic organism, a mammalian cell, a reptile cell, an insect cell, an avian cell, a fish cell, a parasite cell, an arthropod cell, a cell of an invertebrate, a cell of a vertebrate, a rodent cell, a mouse cell, a rat cell, a primate cell, a non-human primate cell, and/or a human cell.

[0020] In some embodiments, the polynucleotide has a sequence identity of at least 70%, 71%, 72%, 73%, 74%, 75%, 76%, 77%, 78%, 79%, 80%, 81%, 82%, 83%, 84%, 85%, 86%, 87%, 88%, 89%, 90%, 91%, 92%, 93%, 94%, 95%, 96%, 97%, 98%, 99%, or 100% to the nucleotide sequence of any one of SEQ ID NOs: 161-231, 241-311, 851-852, and 861-863.

[0021] This invention also provides an engineered, non-naturally occurring CRISPR-Cas system comprising: a) the Type II Cas protein described herein or the polynucleotide encoding the Cas protein thereof, b) at least one engineered guide RNA or at least one engineered nucleic acid encoding the guide RNA thereof, wherein said guide RNA comprises a spacer sequence that is complementary to a target nucleic acid and a Cas protein binding segment that interacts with said Cas protein, wherein the Cas protein binding segment comprises a tracrRNA sequence and a direct repeat (DR) sequence that hybridizes to form a double-stranded RNA (dsRNA) duplex.

[0022] In some embodiments, the guide RNA is a dual guide RNA. In some embodiments, the guide RNA is a single guide RNA. In such embodiments, the guide RNA further comprises a linker sequence connecting the tracrRNA sequence and the DR sequence. In some typical embodiments, the linker comprises a short sequence of GAAA. In some embodiments, the linker serves as an artificial loop. In some embodiments, the sgRNA comprises, in an arrangement: a) a spacer sequence, which is capable of hybridizing to a sequence of the target nucleic acid to be manipulated; b) a DR sequence; c) a linker sequence and d) tracrRNA sequence. The tandem arrangement of the spacer sequence, the DR sequence; the linker sequence and tracrRNA sequence is in a 5′ to 3′ orientation, or in a 3′ to 5′ orientation. In some embodiments, the sgRNA scaffold comprises a sequence having at least 70%, 71%, 72%, 73%, 74%, 75%, 76%, 77%, 78%, 79%, 80%, 81%, 82%, 83%, 84%, 85%, 86%, 87%, 88%, 89%, 90%, 91%, 92%, 93%, 94%, 95%, 96%, 97%, 98%, 99%, or 100% identity to any one of SEQ ID NOs: 431-562.

[0023] In some embodiments, the sgRNA comprises a spacer sequence (such as any one of the sequences of SEQ ID NOs: 571-835, 885, and 901; and a scaffold sequence, and the spacer sequence is located at the 5′ end of the scaffold sequence (such as the sequences of SEQ ID NO: 903). In some embodiments, the sgRNA comprises a sequence having at least 70%, 71%, 72%, 73%, 74%, 75%, 76%, 77%, 78%, 79%, 80%, 81%, 82%, 83%, 84%, 85%, 86%, 87%, 88%, 89%, 90%, 91%, 92%, 93%, 94%, 95%, 96%, 97%, 98%, 99%, or 100% identity to SEQ ID NO: 903.

[0024] In some embodiments, the spacer sequence hybridizes to one or more nucleic acid in a prokaryotic cell or in a eukaryotic cell. In some embodiments, the eukaryotic cell is selected from the group consisting of: a plant cell, a fungal cell, a single cell eukaryotic organism, a mammalian cell, a reptile cell, an insect cell, an avian cell, a fish cell, a parasite cell, an arthropod cell, a cell of an invertebrate, a cell of a vertebrate, a rodent cell, a mouse cell, a rat cell, a primate cell, a non-human primate cell, and a human cell. In some embodiments, the eukaryotic cell comprises a mammalian cell. In some embodiments, the mammalian cell comprises a human cell. In some embodiments, the eukaryotic cell comprises a plant cell.

[0025] In some embodiments, the system further comprising a donor template nucleic acid.

[0026] In some embodiments, the donor template nucleic acid is a double-stranded nucleic acid. In some embodiments, the donor template nucleic acid is a single-stranded nucleic acid. In some embodiments, the donor template nucleic acid is linear. In some embodiments, the donor template nucleic acid is circular (e.g., a plasmid). In some embodiments, the donor template nucleic acid is an exogenous nucleic acid molecule. In some embodiments, the donor template nucleic acid is an endogenous nucleic acid molecule (e.g., a chromosome). In some embodiments, the donor template nucleic acid is a DNA or an RNA or a DNA-RNA hybrid.

[0027] This invention also provides an engineered vector comprising the polynucleotide described in this disclosure.

[0028] In some embodiments, the vector is an expression vector. In some embodiments, the vector is an inducible, conditional, or constitutive expression vector. In some embodiments, the polynucleotide encoding the Cas protein and the polynucleotides encoding the guide RNA are on a same vector or on different vectors.

[0029] This invention also provides a vector system comprising one or more polynucleotides described in this disclosure and one or more polynucleotides encoding a guide RNA; wherein said guide RNA comprises a spacer sequence that is complementary to a target nucleic acid and a Cas protein binding segment that interacts with said Cas protein, wherein the Cas protein binding segment comprises a tracrRNA sequence and a direct repeat (DR) sequence that hybridizes to form a double-stranded RNA (dsRNA) duplex. In some embodiments, the polynucleotide encoding the Cas protein and the polynucleotides encoding the guide RNA are on a same vector or on different vectors.

[0030] In some embodiments, the vectors, e.g., plasmids or viral vectors, are delivered to the tissue of interest by, e.g., intramuscular injection, intravenous administration, transdermal administration, intranasal administration, oral administration, or mucosal administration. Such delivery may be either via a single dose or multiple doses. One skilled in the art understands that the actual dosage to be delivered herein may vary greatly depending upon a variety of factors, such as the vector choices, the target cells, organisms, tissues, the general conditions of the subject to be treated, the degrees of transformation/modification sought, the administration routes, the administration modes, the types of transformation/modification sought, etc.

[0031] This invention also provides an engineered, non-naturally occurring cell comprising: the Cas protein described in this disclosure, the polynucleotide described in this disclosure, the CRISPR-Cas system described in this disclosure, the vector described in this disclosure, or the vector system described in this disclosure.

[0032] This invention also provides a cell modified by utilizing the Cas protein described in this disclosure, the polynucleotide described in this disclosure, the CRISPR-Cas system described in this disclosure, the vector described in this disclosure, or the vector system described in this disclosure.

[0033] In some embodiments, the cell is a eukaryotic cell or a prokaryotic cell. In some embodiments, the eukaryotic cell is selected from the group consisting of: a plant cell, a fungal cell, a single cell eukaryotic organism, a mammalian cell, a reptile cell, an insect cell, an avian cell, a fish cell, a parasite cell, an arthropod cell, a cell of an invertebrate, a cell of a vertebrate, a rodent cell, a mouse cell, a rat cell, a primate cell, a non-human primate cell, and a human cell. In some embodiments, the cell is a mammalian cell or a human cell or a plant cell.

[0034] In some embodiments, the cell is a vertebrate, mammalian, rodent, goat, pig, bird, chicken, turkey, cow, horse, sheep, fish, primate, or human cell. In some embodiments, the cell is a mammalian cell. In one embodiment, the cell is a human cell. In some embodiments, the cell is a somatic cell, a germ cell, or a prenatal cell. In some embodiments, the cell is a zygotic cell, a blastocyst cell, an embryonic cell, a stem cell, a mitotically competent cell, or a meiotically competent cell. In some embodiments, the cell is not part of a human embryo. In some embodiments, the cell is a somatic cell. In one embodiment, the cell is a T cell, a CD8+ T cell, a CD8+ naive T cell, a central memory T cell, an effector memory T cell, a CD4+ T cell, a stem cell memory T cell, a helper T cell, a regulatory T cell, a cytotoxic T cell, a natural killer T cell, a Hematopoietic Stem Cell, a long term hematopoietic stem cell, a short term hematopoietic stem cell, a multipotent progenitor cell, a lineage restricted progenitor cell, a lymphoid progenitor cell, a myeloid progenitor cell, a common myeloid progenitor cell, an erythroid progenitor cell, a megakaryocyte erythroid progenitor cell, a retinal cell, a photoreceptor cell, a rod cell, a cone cell, a retinal pigmented epithelium cell, a trabecular meshwork cell, a cochlear hair cell, an outer hair cell, an inner hair cell, a pulmonary epithelial cell, a bronchial epithelial cell, an alveolar epithelial cell, a pulmonary epithelial progenitor cell, a striated muscle cell, a cardiac muscle cell, a muscle satellite cell, a neuron, a neuronal stem cell, a mesenchymal stem cell, an induced pluripotent stem (iPS) cell, an embryonic stem cell, a monocyte, a megakaryocyte, a neutrophil, an eosinophil, a basophil, a mast cell, a reticulocyte, a B cell, e.g., a progenitor B cell, a Pre B cell, a Pro B cell, a memory B cell, a plasma B cell, a gastrointestinal epithelial cell, a biliary epithelial cell, a pancreatic ductal epithelial cell, an intestinal stem cell, a hepatocyte, a liver stellate cell, a Kupffer cell, an osteoblast, an osteoclast, an adipocyte, a preadipocyte, a pancreatic islet cell (e.g., a beta cell, an alpha cell, a delta cell), a pancreatic exocrine cell, a Schwann cell, or an oligodendrocyte. In some embodiments, the cell is a T cell, a Hematopoietic Stem Cell, a retinal cell, a cochlear hair cell, a pulmonary epithelial cell, a muscle cell, a neuron, a mesenchymal stem cell, an induced pluripotent stem (iPS) cell, or an embryonic stem cell. In another embodiment, the cell is a plant cell.

[0035] In some embodiments, the disclosure provides an isolated eukaryotic cell comprising a modified target locus of interest, wherein the target locus of interest has been modified according to a method or using of a composition or using of a system described in this invention.

[0036] In some embodiments, the cell is a eukaryotic cell or a prokaryotic cell. In some embodiments, the eukaryotic cell is selected from the group consisting of: a plant cell, a fungal cell, a single cell eukaryotic organism, a mammalian cell, a reptile cell, an insect cell, an avian cell, a fish cell, a parasite cell, an arthropod cell, a cell of an invertebrate, a cell of a vertebrate, a rodent cell, a mouse cell, a rat cell, a primate cell, a non-human primate cell, and a human cell. In some embodiments, the cell is a mammalian cell or a human cell or a plant cell.

[0037] In some embodiments, the cell is a vertebrate, mammalian, rodent, goat, pig, bird, chicken, turkey, cow, horse, sheep, fish, primate, or human cell. In some embodiments, the cell is a mammalian cell. In one embodiment, the cell is a human cell. In some embodiments, the cell is a somatic cell, a germ cell, or a prenatal cell. In some embodiments, the cell is a zygotic cell, a blastocyst cell, an embryonic cell, a stem cell, a mitotically competent cell, or a meiotically competent cell. In some embodiments, the cell is not part of a human embryo. In some embodiments, the cell is a somatic cell. In one embodiment, the cell is a T cell, a CD8+ T cell, a CD8+ naive T cell, a central memory T cell, an effector memory T cell, a CD4+ T cell, a stem cell memory T cell, a helper T cell, a regulatory T cell, a cytotoxic T cell, a natural killer T cell, a Hematopoietic Stem Cell, a long term hematopoietic stem cell, a short term hematopoietic stem cell, a multipotent progenitor cell, a lineage restricted progenitor cell, a lymphoid progenitor cell, a myeloid progenitor cell, a common myeloid progenitor cell, an erythroid progenitor cell, a megakaryocyte erythroid progenitor cell, a retinal cell, a photoreceptor cell, a rod cell, a cone cell, a retinal pigmented epithelium cell, a trabecular meshwork cell, a cochlear hair cell, an outer hair cell, an inner hair cell, a pulmonary epithelial cell, a bronchial epithelial cell, an alveolar epithelial cell, a pulmonary epithelial progenitor cell, a striated muscle cell, a cardiac muscle cell, a muscle satellite cell, a neuron, a neuronal stem cell, a mesenchymal stem cell, an induced pluripotent stem (iPS) cell, an embryonic stem cell, a monocyte, a megakaryocyte, a neutrophil, an eosinophil, a basophil, a mast cell, a reticulocyte, a B cell, e.g., a progenitor B cell, a Pre B cell, a Pro B cell, a memory B cell, a plasma B cell, a gastrointestinal epithelial cell, a biliary epithelial cell, a pancreatic ductal epithelial cell, an intestinal stem cell, a hepatocyte, a liver stellate cell, a Kupffer cell, an osteoblast, an osteoclast, an adipocyte, a preadipocyte, a pancreatic islet cell (e.g., a beta cell, an alpha cell, a delta cell), a pancreatic exocrine cell, a Schwann cell, or an oligodendrocyte. In some embodiments, the cell is a T cell, a Hematopoietic Stem Cell, a retinal cell, a cochlear hair cell, a pulmonary epithelial cell, a muscle cell, a neuron, a mesenchymal stem cell, an induced pluripotent stem (iPS) cell, or an embryonic stem cell. In another embodiment, the cell is a plant cell.

[0038] This invention also provides a kit comprising: the Cas protein described in this disclosure, the polynucleotide described in this disclosure, the CRISPR-Cas system described in this disclosure, the vector described in this disclosure, the vector system described in this disclosure, or the cell described in this disclosure.

[0039] The kits described in this disclosure may encompass one or more containers with components essential for performing the methods in this disclosure, and may optionally contain instructions for use. Any of the kits delineated may additionally comprise ancillary components required for the execution of the editing methods. Each component within the kits, where applicable, may be provided in a liquid form (e.g., dissolved in solution) or in a solid form (e.g., lyophilized powder). In specific embodiments, some components may be reconstituted or otherwise processed (e.g., to an active state) upon the addition of a suitable solvent or other substance (such as water or buffer), which may or may not be furnished with the kit. In some embodiments, the kit may further comprise other suitable excipients such as buffers or reagents for facilitating the application of the kit. Preferably, the kit may be applied in various applications such as medical applications including therapies and diagnosis, researches and the like. Accordingly, the type II Cas nuclease and the kit of the present invention may be used in the preparation of a medicament for treatment and/or in the preparation of an agent for research study.

[0040] The Cas protein, CRISPR-Cas system, polynucleotide described herein, can be delivered by various delivery systems such as vectors, e.g., plasmids, viral delivery vectors, such as adeno-associated viruses (AAV), lentiviruses, adenoviruses, and other viral vectors, or methods, such as nucleofection or electroporation of ribonucleoprotein complexes consisting of Type V-I effectors and their cognate RNA guide or guides. The proteins and one or more RNA guides can be packaged into one or more vectors, e.g., plasmids or viral vectors. For bacterial applications, the nucleic acids encoding any of the components of the CRISPR systems described herein can be delivered to the bacteria using a phage. Exemplary phages, include, but are not limited to, T4 phage, Mu, λ phage, T5 phage, T7 phage, T3 phage, Φ29, M13, MS2, Qβ, and Φ174.

[0041] This invention also provides a pharmaceutical composition comprising: the Cas protein described in this disclosure, the polynucleotide described in this disclosure, the CRISPR-Cas system described in this disclosure, the vector described in this disclosure, the vector system described in this disclosure or the cell described in this disclosure.

[0042] As presented in this disclosure, the term “pharmaceutical composition” refers to a formulation intended for pharmaceutical use. In certain embodiments, the pharmaceutical composition further comprises a pharmaceutically acceptable excipient. In some embodiments, the pharmaceutical composition may include additional therapeutic agents. In some embodiments, the pharmaceutical composition is prepared following standard procedures for administration via intravenous, intramuscular, intradermal, intra-articular, intralesional, intraperitoneal, intracardiac, intrathecal, intracerebroventrical, epidural, topical, subconjunctival, intrastromal, peribulbar, intravitreal, posterior juxlascleral, transscleral, suprachoroidal, retrobulbar, subretinal, sub-tenon, nasal inhalational, pressurized inhalation, oral, subcutaneous or local routes to a subject, such as a human patient. For instance, compositions for injection may be provided as sterile isotonic aqueous solutions. If necessary, the pharmaceutical composition may also contain solubilizing agents and local anesthetics, such as lidocaine, to minimize injection site discomfort. Typically, components are supplied either separately or in admixture as a unit dose, e.g., as a lyophilized powder or a concentrated solution devoid of water, in a hermetically sealed container that indicates the quantity of the active agent(s). Where the pharmaceutical composition is intended for infusion, it may be combined with an infusion bottle containing sterile pharmaceutical-grade water or saline. Where the pharmaceutical composition is for injection, sterile water for injection or saline may be included to allow for component mixing prior to administration. Additionally, wetting agents, coloring agents, release agents, coating agents, sweetening agents, flavoring agents, perfuming agents, preservatives, and antioxidants may also be incorporated into the formulation as needed.

[0043] In some embodiments, the pharmaceutical composition further comprises a delivery system selected from: AAV (adeno-associated viruses), Adenoviruses, retroviruses, HSV (herpes simplex virus), Gammaretrovirus, LV (lentivirus), eCIS (extracellular Contractile Injection System), eVLPs (Engineered virus-like particles), VLPs (virus-like particles), liposomes, plasmid, LNPs (lipid nanoparticles), exosomes, microvesicles, nucleic acid nanoassemblies, a gene gun, and/or an implantable device.

[0044] In certain embodiments, the delivery is via adeno-associated viruses (AAV), e.g., AAV2, AAV8, or AAV9, which can be administered in a single dose containing at least 1×10⁵ particles (also referred to as particle units, pu) of adenoviruses or adeno-associated viruses.

[0045] In some embodiments, the delivery is via a recombinant adeno-associated virus (rAAV) vector. For example, in some embodiments, a modified AAV vector may be used for delivery. Modified AAV vectors can be based on one or more of several capsid types, including AAV1, AAV2, AAV5, AAV6, AAV8, AAV8.2. AAV9, AAV rh1O, modified AAV vectors (e.g., modified AAV2, modified AAV3, modified AAV6) and pseudotyped AAV (e.g., AAV2/8, AAV2/5 and AAV2/6).

[0046] In some embodiments, the delivery is via plasmids. The dosage can be a sufficient number of plasmids to elicit a response. In some embodiments, suitable quantities of plasmid DNA in plasmid compositions can be from about 0.1 to about 2 mg. Plasmids will generally include (i) a promoter; (ii) a sequence encoding a nucleic acid-targeting CRISPR enzymes, operably linked to the promoter; (iii) a selectable marker; (iv) an origin of replication; and (v) a transcription terminator downstream of and operably linked to (ii). The plasmids can also encode the RNA components of a CRISPR-Cas system, but one or more of these may instead be encoded on different vectors. The frequency of administration is within the ambit of the medical or veterinary practitioner (e.g., physician, veterinarian), or a person skilled in the art.

[0047] This invention also provides the use of the Cas protein, polynucleotide, CRISPR-Cas system, vector, vector system, cell, kit, or pharmaceutical composition described in this disclosure for the treatment, prevention, diagnosis, or detection of a disease.

[0048] This invention also provides a method of modifying or targeting a target DNA locus, wherein the method comprising delivering to said locus: the Cas protein described in this disclosure; the polynucleotide described in this disclosure; the CRISPR-Cas system described in this disclosure; the vector described in this disclosure, the vector system described in this disclosure the kit described in this disclosure or the pharmaceutical composition described in this disclosure.

[0049] In some embodiments, the disclosure also provides a method of targeting and cleaving a target DNA, the method comprising: contacting the target DNA with the Cas protein described in this disclosure; the polynucleotide described in this disclosure; the CRISPR-Cas system described in this disclosure; the vector described in this disclosure, the vector system described in this disclosure the kit described in this disclosure or the pharmaceutical composition described in this disclosure.

[0050] In some embodiments, said modifying or targeting a target locus comprises inducing a DNA strand break. In some embodiments, said modifying or targeting a target locus comprises inducing a DNA double strand break or a DNA single strand break. In some embodiments, said modifying or targeting a target locus comprises altering gene expression of one or more genes. In some embodiments, said modifying or targeting a target locus comprises epigenetic modification of said target DNA locus. In some embodiments, the method is a method of modifying a cell, a cell line, or an organism by manipulation of one or more target sequences at genomic loci of interest.

[0051] In some embodiments, cleaving the target DNA or target sequence results in the formation of an indel or the insertion of a nucleotide sequence. In some embodiments, cleaving the target DNA or target nucleotide comprising cleaving the target DNA or target sequence in two sites, and results in the deletion or inversion of a sequence between the two sites. In some embodiments, the target DNA is a double stranded DNA or a single stranded DNA, or DNA-RNA hybrids.

[0052] In some embodiments, said modifying or targeting a target locus comprises inducing a DNA strand break, altering gene expression of one or more genes, or epigenetic modification of said target DNA locus; optionally, the DNA strand break comprise a DNA double strand break or a DNA single strand break.

[0053] In some embodiments, the method is performed in vitro or in vivo.

[0054] This invention also provides an isolated eukaryotic cell comprising a modified target locus of interest, wherein the target locus of interest has been modified according to the method described in this disclosure, or by using the system described in this disclosure, or by using the Cas protein described in this disclosure; or by using the polynucleotide described in this disclosure; or by using the CRISPR-Cas system described in this disclosure; or by using the vector described in this disclosure, or by using the vector system described in this disclosure the, or by using the kit described in this disclosure, or by using the pharmaceutical composition described in this disclosure.

[0055] This invention also provides a system for detecting the presence of a nucleic acid target sequence in an in vitro sample, comprising: a) a Cas protein described in this disclosure; b) at least one guide polynucleotide comprising a guide sequence capable of binding the target sequence, and designed to form a complex with the Cas protein; and c) a nucleic acid-based masking construct comprising a non-target sequence; wherein the Cas protein exhibits collateral cleavage activity of RNA and/or ssDNA and cleaves the non-target sequence of the nucleic acid-based masking construct activated by the target sequence.

[0056] This invention also provides a method for detecting target nucleic acids in samples comprising: contacting one or more samples with a) a Cas protein described in this disclosure; b) at least one guide polynucleotide comprising a guide sequence designed to have a degree of complementarity with the target sequence, and designed to form a complex with the Cas protein; and c) a nucleic acid-based masking construct comprising a non-target sequence; wherein the Cas protein exhibits collateral cleavage activity of RNA and/or ssDNA and cleaves the non-target sequence of the nucleic acid-based masking construct activated by the target sequences; and detecting a signal from cleavage of the non-target sequence, thereby detecting the one or more target sequences in the sample.

[0057] This invention also provides a guide RNA (gRNA) comprising: a) a spacer sequence of SEQ ID NO: 901; b) a spacer sequence having at least 15, 16, 17, 18, 19, or 20 contiguous nucleotides of the sequence of SEQ ID NO: 901; c) a spacer sequence with at least 99%, 98%, 97%, 96%, 95%, 94%, 93%, 92%, 91%, or 90% identity to the sequence of SEQ ID NO: 901. In some embodiments, the gRNA further comprises a Cas protein binding segment; and wherein the Cas protein binding segment comprises a tracrRNA sequence and a direct repeat (DR) sequence that hybridizes to form a double-stranded RNA (dsRNA) duplex. In some embodiments, the gRNA is a dual guide RNA. In some embodiments, the gRNA is a single guide RNA. In some embodiments, the gRNA is modified. In some embodiments, at least three nucleotides of the gRNA are modified. In some embodiment, the gRNA comprises a 5′ end modification comprising at least two phosphorothioate (PS) linkages within the first seven nucleotides at the 5′ end of the 5′ terminus. In some embodiments, the gRNA comprises a 3′ end modification comprising at least two phosphorothioate (PS) linkages within the first seven nucleotides at the 3′ end of the 3′ terminus. In some embodiments, the gRNA has a sequence identity of at least 70%, 71%, 72%, 73%, 74%, 75%, 76%, 77%, 78%, 79%, 80%, 81%, 82%, 83%, 84%, 85%, 86%, 87%, 88%, 89%, 90%, 91%, 92%, 93%, 94%, 95%, 96%, 97%, 98%, 99%, or 100% to the nucleotide sequence of any one of SEQ ID NO: 903.

[0058] This invention also provides polynucleotide encoding the gRNA described herein; wherein the guide RNA (gRNA) comprising: a) a spacer sequence of SEQ ID NO: 901; b) a spacer sequence having at least 15, 16, 17, 18, 19, or 20 contiguous nucleotides of the sequence of SEQ ID NO: 901; c) a spacer sequence with at least 99%, 98%, 97%, 96%, 95%, 94%, 93%, 92%, 91%, or 90% identity to the sequence of SEQ ID NO: 901. In some embodiments, the gRNA comprises a sequence having at least 70%, 71%, 72%, 73%, 74%, 75%, 76%, 77%, 78%, 79%, 80%, 81%, 82%, 83%, 84%, 85%, 86%, 87%, 88%, 89%, 90%, 91%, 92%, 93%, 94%, 95%, 96%, 97%, 98%, 99%, or 100% identity to any one of SEQ ID NO: 903.

[0059] This invention also provides an engineered, non-naturally occurring CRISPR-Cas system comprising: a) a Cas protein or a polynucleotide encoding the Cas protein thereof, b) at least one guide RNA (gRNA) described in this disclosure or at least one engineered nucleic acid encoding the guide RNA thereof, wherein said gRNA further comprises a Cas protein binding segment that interacts with said Cas protein; and wherein the Cas protein binding segment comprises a tracrRNA sequence and a direct repeat (DR) sequence that hybridizes to form a double-stranded RNA (dsRNA) duplex; wherein the guide RNA (gRNA) comprising: a) a spacer sequence of SEQ ID NO: 901; b) a spacer sequence having at least 15, 16, 17, 18, 19, or 20 contiguous nucleotides of the sequence of SEQ ID NO: 901; c) a spacer sequence with at least 99%, 98%, 97%, 96%, 95%, 94%, 93%, 92%, 91%, or 90% identity to the sequence of SEQ ID NO: 901. In some embodiments, the gRNA comprises: a) a sequence of SEQ ID NO: 903; or b) a sequence having at least 70%, 71%, 72%, 73%, 74%, 75%, 76%, 77%, 78%, 79%, 80%, 81%, 82%, 83%, 84%, 85%, 86%, 87%, 88%, 89%, 90%, 91%, 92%, 93%, 94%, 95%, 96%, 97%, 98%, 99%, or 100% identity to the sequence of SEQ ID NO: 903.

[0060] In some embodiments, the Cas protein comprises a sequence having at least 70%, 71%, 72%, 73%, 74%, 75%, 76%, 77%, 78%, 79%, 80%, 81%, 82%, 83%, 84%, 85%, 86%, 87%, 88%, 89%, 90%, 91%, 92%, 93%, 94%, 95%, 96%, 97%, 98%, 99%, or 100% identity to any one of SEQ ID NO: 12; or the Cas protein comprises a sequence having at least 70%, 71%, 72%, 73%, 74%, 75%, 76%, 77%, 78%, 79%, 80%, 81%, 82%, 83%, 84%, 85%, 86%, 87%, 88%, 89%, 90%, 91%, 92%, 93%, 94%, 95%, 96%, 97%, 98%, 99%, or 100% identity to any one of SEQ ID NO: 12, with the exception of the amino acid “M” at position 1 of the sequence.

[0061] In some embodiments, the Cas protein further comprises an effector domain (or functional domain). Such effector domains can have one or more types of enzymatic activities, including polymerase activity, ligase activity, reverse transcriptase activity, deaminase activity, replication activity, or proofreading activity. In some embodiment, the effector domains domain comprises a nuclease, a nickase, a deaminase, a reverse transcriptase, a recombinase, a methyltransferase, a methylase, an acetylase, an acetyltransferase, a transcriptional activator, a transcriptional repressor domain, a cryptochrome, a light inducible/controllable domain, or a chemically inducible/controllable domain.

[0062] In some embodiments, the Cas protein further comprises one or more of a nuclear localization signal sequence, a nuclear export signal sequence, a cell penetrating peptide sequence, an affinity tag. the type II Cas protein comprises one or more nuclear localization signal(s) NLS(s). The NLS(s) can locate at the end or other portion of the peptide. The NLS(s) located each end or other portion of the Cas9 amino acid sequence can be same or not. In some embodiments, the NLS of the N-terminal end and the NLS of the C-terminal end are the same. In some embodiments, the NLS of the N-terminal end and the NLS of the C-terminal end are different. In some embodiments, the N-terminal end of the Cas9 amino acid sequence comprising one NLS and the C-terminal end of the Cas9 amino acid sequence comprising one NLS. The amino acid sequence of NLS fused to the N-terminal end and/or the C-terminal end of the Cas9 amino acid sequence respectively. NLS maybe an SV40 (simian virus 40) NLS, c-Myc NLS, or other suitable monopartite NLS. The NLS may be fused to an N-terminal and/or a C-terminal of the Cas protein. In some embodiments, an affinity tag (such as GST, FLAG or hexahistidine sequences) is utilized for purification of the Cas protein by affinity chromatography. In some embodiments, the amino acid sequence of C-terminal NLS is set forth in SEQ ID NO: 881 or 882. In some embodiments, the amino acid sequence of the C-terminal FLAG sequence is set forth in SEQ ID NO: 883. Other available sequences and different combinations can also be chosen for the NLSs sequences and FLAG sequence.

[0063] In some embodiments, the Cas protein comprises an amino acid sequence having at least 70%, 71%, 72%, 73%, 74%, 75%, 76%, 77%, 78%, 79%, 80%, 81%, 82%, 83%, 84%, 85%, 86%, 87%, 88%, 89%, 90%, 91%, 92%, 93%, 94%, 95%, 96%, 97%, 98%, 99%, or 100% sequence identity to the amino acid sequence of SEQ ID NO: 12.

[0064] In some embodiments, the Cas protein has a sequence identity of at least 70%, 71%, 72%, 73%, 74%, 75%, 76%, 77%, 78%, 79%, 80%, 81%, 82%, 83%, 84%, 85%, 86%, 87%, 88%, 89%, 90%, 91%, 92%, 93%, 94%, 95%, 96%, 97%, 98%, 99%, or 100% to the amino acid sequence of SEQ ID NO: 12, and is capable of recognizing a protospacer adjacent motif (PAM) having a sequence of: NRHACT.

[0065] In some embodiments, the Cas protein is a nickase or dead Cas protein. The DNA cleavage domain of an active Cas protein in this invention include two subdomains, the HNH nuclease subdomain and the RuvC subdomain. Mutations within these subdomains can silence the nuclease activity of the Cas protein. In some embodiments, Cas protein has a sequence identity of at least 70%, 71%, 72%, 73%, 74%, 75%, 76%, 77%, 78%, 79%, 80%, 81%, 82%, 83%, 84%, 85%, 86%, 87%, 88%, 89%, 90%, 91%, 92%, 93%, 94%, 95%, 96%, 97%, 98%, 99%, or 100% to the amino acid sequence of SEQ ID NO: 12, and includes a mutation at residue D10 or H862. In some embodiments, the Cas protein has a sequence identity of at least 70%, 71%, 72%, 73%, 74%, 75%, 76%, 77%, 78%, 79%, 80%, 81%, 82%, 83%, 84%, 85%, 86%, 87%, 88%, 89%, 90%, 91%, 92%, 93%, 94%, 95%, 96%, 97%, 98%, 99%, or 100% to the amino acid sequence of SEQ ID NO: 12, and includes a mutation at residue D10 or H862, with the exception of the amino acid “M” at position 1 of the sequence.

[0066] In some embodiments, the mutation at residue D10 or H862 of SEQ ID NO: 12 is D10A or H862A. In some embodiments, the Cas protein has a sequence identity of at least 70%, 71%, 72%, 73%, 74%, 75%, 76%, 77%, 78%, 79%, 80%, 81%, 82%, 83%, 84%, 85%, 86%, 87%, 88%, 89%, 90%, 91%, 92%, 93%, 94%, 95%, 96%, 97%, 98%, 99%, or 100% to the amino acid sequence of any one of SEQ ID NOs: 872-874.

[0067] This invention also provides an engineered vector comprising the polynucleotide encoding the gRNA described in this disclosure; wherein the guide RNA (gRNA) comprising: a) a spacer sequence of SEQ ID NO: 901; b) a spacer sequence having at least 15, 16, 17, 18, 19, or 20 contiguous nucleotides of the sequence of SEQ ID NO: 901; c) a spacer sequence with at least 99%, 98%, 97%, 96%, 95%, 94%, 93%, 92%, 91%, or 90% identity to the sequence of SEQ ID NO: 901. In some embodiments, the gRNA comprises: a) a sequence of SEQ ID NO: 903; or b) a sequence having at least 70%, 71%, 72%, 73%, 74%, 75%, 76%, 77%, 78%, 79%, 80%, 81%, 82%, 83%, 84%, 85%, 86%, 87%, 88%, 89%, 90%, 91%, 92%, 93%, 94%, 95%, 96%, 97%, 98%, 99%, or 100% identity to SEQ ID NO: 903.

[0068] In some embodiments, said vector is optionally an inducible, conditional, or constitutive expression vector.

[0069] This invention also provides a vector system comprising one or more polynucleotide encoding the gRNA described in this disclosure; wherein the guide RNA (gRNA) comprising: a) a spacer sequence of SEQ ID NO: 901; b) a spacer sequence having at least 15, 16, 17, 18, 19, or 20 contiguous nucleotides of the sequence of SEQ ID NO: 901; c) a spacer sequence with at least 99%, 98%, 97%, 96%, 95%, 94%, 93%, 92%, 91%, or 90% identity to the sequence of SEQ ID NO: 871. In some embodiments, the gRNA comprises: a) a sequence of SEQ ID NO: 903; or b) a sequence having at least 70%, 71%, 72%, 73%, 74%, 75%, 76%, 77%, 78%, 79%, 80%, 81%, 82%, 83%, 84%, 85%, 86%, 87%, 88%, 89%, 90%, 91%, 92%, 93%, 94%, 95%, 96%, 97%, 98%, 99%, or 100% identity to SEQ ID NO: 903.

[0070] This invention also provides a pharmaceutical composition comprising the gRNA described in this disclosure; the polynucleotide encoding such gRNA, the CRISPR-Cas system comprising such gRNA or polynucleotide, the vector comprising such gRNA encoding sequence, the vector system such gRNA encoding sequence; wherein the guide RNA (gRNA) comprising: a) a spacer sequence of SEQ ID NO: 901; b) a spacer sequence having at least 15, 16, 17, 18, 19, or 20 contiguous nucleotides of the sequence of SEQ ID NO: 901; c) a spacer sequence with at least 99%, 98%, 97%, 96%, 95%, 94%, 93%, 92%, 91%, or 90% identity to the sequence of SEQ ID NO: 901, In some embodiments, the gRNA comprises: a) a sequence of SEQ ID NO: 903; or b) a sequence having at least 70%, 71%, 72%, 73%, 74%, 75%, 76%, 77%, 78%, 79%, 80%, 81%, 82%, 83%, 84%, 85%, 86%, 87%, 88%, 89%, 90%, 91%, 92%, 93%, 94%, 95%, 96%, 97%, 98%, 99%, or 100% identity to SEQ ID NO: 903.

[0071] This invention also provide a method for treating, preventing, or diagnosing diseases associated with the RHO gene locus in a subject, comprising contacting the target cell with the gRNA described in this disclosure; b) contacting the target cell with the polynucleotide encoding such gRNA; c) contacting the target cell with the CRISPR-Cas system comprising such gRNA or polynucleotide; or d) contacting the target cell with the pharmaceutical described in this disclosure; wherein the guide RNA (gRNA) comprising: a) a spacer sequence of SEQ ID NO: 901; b) a spacer sequence having at least 15, 16, 17, 18, 19, or 20 contiguous nucleotides of the sequence of SEQ ID NO: 901; c) a spacer sequence with at least 99%, 98%, 97%, 96%, 95%, 94%, 93%, 92%, 91%, or 90% identity to the sequence of SEQ ID NO: 901. In some embodiments, the gRNA comprises: a) a sequence of SEQ ID NO: 903; or b) a sequence having at least 70%, 71%, 72%, 73%, 74%, 75%, 76%, 77%, 78%, 79%, 80%, 81%, 82%, 83%, 84%, 85%, 86%, 87%, 88%, 89%, 90%, 91%, 92%, 93%, 94%, 95%, 96%, 97%, 98%, 99%, or 100% identity to SEQ ID NO: 903.

[0072] This invention also provides a method of treating, preventing or diagnosing diseases associated with gene locus in a subject, comprising administering a) the gRNA described in this disclosure; b) administering the target cell with the polynucleotide encoding such gRNA; c) administering the target cell with the CRISPR-Cas system comprising such gRNA or polynucleotide; or d) administering the target cell with the pharmaceutical described in this disclosure; wherein the guide RNA (gRNA) comprising: i) a spacer sequence of SEQ ID NO: 901. ii) a spacer sequence having at least 15, 16, 17, 18, 19, or 20 contiguous nucleotides of the sequence of SEQ ID NO: 901; or iii) a spacer sequence with at least 99%, 98%, 97%, 96%, 95%, 94%, 93%, 92%, 91%, or 90% identity to the sequence of SEQ ID NO: 901. In some embodiments, the gRNA comprises: a sequence of SEQ ID NO: 903; or a sequence having at least 70%, 71%, 72%, 73%, 74%, 75%, 76%, 77%, 78%, 79%, 80%, 81%, 82%, 83%, 84%, 85%, 86%, 87%, 88%, 89%, 90%, 91%, 92%, 93%, 94%, 95%, 96%, 97%, 98%, 99%, or 100% identity to SEQ ID NO: 903.

[0073] This invention also provides a composition comprising: (i) a Cas protein, wherein:
[0074] a. the Cas protein comprises a sequence with at least 90% identity to SEQ ID NO: 12 or 92; and/or
[0075] b. the Cas protein comprises a sequence with at least 95%, 96%, 97%, 98%, 99%, 100% identity to SEQ ID NO: 12 or 92; and/or
   (ii) a sgRNA or a vector encoding a sgRNA, wherein the sgRNA comprises a sgRNA sequence of SEQ ID NO: 903.

[0076] This invention also provides a method of modifying the RHO gene locus, comprising delivering a composition to a cell, wherein the composition comprises:
[0077] a. a guide RNA comprising a guide sequence of SEQ ID NO: 901;
[0078] b. a guide RNA comprising at least 17, 18, 19 or 20 contiguous nucleotides of a sequence of SEQ ID NO: 901; or
[0079] c. a guide RNA comprising a guide sequence that with at least 99%, 98%, 97%, 96%, 95%, 94%, 93%, 92%, 91%, or 90% identity to a sequence of SEQ ID NO: 901.

[0080] This invention also provides a method of treating, preventing or diagnosing diseases associated with RHO in a subject, comprising administering a composition to a subject in need thereof, wherein the composition comprises:
[0081] a. a guide RNA comprising a guide sequence of SEQ ID NO: 901;
[0082] b. a guide RNA comprising at least 17, 18, 19 or 20 contiguous nucleotides of a sequence of SEQ ID NO: 901; or
[0083] c. a guide RNA comprising a guide sequence that with at least 99%, 98%, 97%, 96%, 95%, 94%, 93%, 92%, 91%, or 90% identity to a sequence of SEQ ID NO: 901.

[0084] This invention also provides a method of modifying the RHO gene locus, comprising delivering a composition to a cell, wherein the composition comprises:
[0085] a. a sgRNA comprising a sgRNA sequence of SEQ ID NO: 903;
[0086] b. a sgRNA comprising a sgRNA sequence with at least 90% identity to a sequence of SEQ ID NO: 903; or
[0087] c. a sgRNA comprising a sgRNA sequence with at least 99%, 98%, 97%, 96%, 95%, 94%, 93%, 92%, 91%, or 90% identity to a sequence of SEQ ID NO: 903.

[0088] This invention also provides a method of treating, preventing or diagnosing diseases associated with RHO in a subject, comprising administering a composition to a subject in need thereof, wherein the composition comprises:
[0089] a. a sgRNA comprising a sgRNA sequence of SEQ ID NO: 903;
[0090] b. a sgRNA comprising a sgRNA sequence with at least 90% identity to a sequence of SEQ ID NO: 903; or
[0091] c. a sgRNA comprising a sgRNA sequence with at least 99%, 98%, 97%, 96%, 95%, 94%, 93%, 92%, 91%, or 90% identity to a sequence of SEQ ID NO: 903.

[0092] This invention also provides a method of treating, preventing or diagnosing diseases associated with RHO in a subject, comprising administering a composition to a subject in need thereof, wherein the composition comprises:
[0093] a. a guide RNA comprising a spacer sequence of SEQ ID NO: 901;
[0094] b. a guide RNA comprising at least 17, 18, 19 or 20 contiguous nucleotides of a sequence of SEQ ID NO: 901; or
[0095] c. a guide RNA comprising a guide sequence that with at least 99%, 98%, 97%, 96%, 95%, 94%, 93%, 92%, 91%, or 90% identity to a sequence of SEQ ID NO: 901.

[0096] This invention also provides a method of modifying the RHO gene locus, comprising delivering a composition to a cell, wherein the composition comprises:
[0097] (i) a Cas protein, wherein:
   [0098] a. the Cas protein comprises a sequence with at least 90% identity to SEQ ID NO: 12 or 92; and/or
   [0099] b. the RNA-guided DNA binding agent comprises a sequence with at least 95%, 96%, 97%, 98%, 99%, 100% identity to SEQ ID NO: 12 or 92; and/or
[0100] (ii) a guide RNA or a vector encoding a guide RNA, wherein the guide RNA comprises a spacer sequence of SEQ ID NO: 901.

[0101] This invention also provides a method of treating, preventing or diagnosing diseases associated with RHO in a subject, comprising administering a composition to a subject in need thereof, wherein the composition comprises:
[0102] (i) an RNA-guided DNA binding agent, wherein:
   [0103] a. the RNA-guided DNA binding agent comprises a sequence with at least 90% identity to SEQ ID NO: 12 or 92; and/or
   [0104] b. the RNA-guided DNA binding agent comprises a sequence with at least 95%, 96%, 97%, 98%, 99%, 100% identity to SEQ ID NO: 12 or 92; and/or
[0105] (ii) a sgRNA or a vector encoding a sgRNA, wherein the sgRNA comprises a sequence of SEQ ID NO: 903.

[0106] These and other aspects, objects, features, and advantages of the example embodiments will become apparent to those having ordinary skill in the art upon consideration of the following detailed description of illustrated example embodiments.

### BRIEF DESCRIPTION OF THE DRAWINGS

[0107] An understanding of the features and advantages of the present disclosure will be obtained by reference to the following detailed description that sets forth illustrative embodiments, in which the principles of the disclosure may be utilized, and the accompanying drawings of which:

[0108] FIG. 1 show the domain arrangement of GEBx type II Cas proteins;

[0109] FIGS. 2A-2E shows the PAM preference of Cas9 in HEK293 cell line;

[0110] FIG. 3 (FIG. 3) shows the indel levels of GEBx0305 across 16 targets with GGAAAA-PAM in HEK293T cell line (n=3);

[0111] FIG. 4 (FIG. 4) shows the indel levels of GEBx0308 across 19 targets with GGTACT-PAM in HEK293T cell line (n=3);

[0112] FIG. 5 (FIG. 5) shows the indel levels of GEBx0308 across 15 targets with CATACT-PAM in HEK293T cell line (n=3);

[0113] FIG. 6 (FIG. 6) shows the indel levels of GEBx0328 across 20 targets with NGGCCT-PAM in HEK293T cell line (n=3);

[0114] FIG. 7 shows the indel levels of GEBx0361 across 11 targets with GGTACC-PAM in HEK293T cell line (n=2).

[0115] FIG. 8 shows the indel levels of GEBx0361 across 8 targets with TGTACC-PAM in HEK293T cell line (n=2).

[0116] FIG. 9: A and B (FIG. 9: A and B) show indel levels vary depending on the length of the guide sequence of GEBx0305 (n=3);

[0117] FIG. 10: A and B (FIG. 10: A and B) show indel levels vary depending on the length of the guide sequence of GEBx0308 (n=3);

[0118] FIG. 11: A and B (FIG. 10: A and B) show indel levels vary depending on the length of the guide sequence of GEBx0328 (n=3);

[0119] FIG. 12: A and B (FIG. 12: A and B) show indel levels of GEBx0305 targeting endogenous genes with modified RNAs scaffold (n=3);

[0120] FIG. 13: A and B (FIG. 13: A and B) show indel levels of GEBx0308 targeting endogenous genes with modified RNAs scaffold (n=3);

[0121] FIG. 14: A and B (FIG. 14 A and B) show indel levels of GEBx0305 targeting endogenous genes under optimal conditions (n=3);

[0122] FIG. 15: A and B (FIG. 15: A and B) show indel levels of GEBx0308 targeting endogenous genes under optimal conditions (n=3);

[0123] FIG. 16: A and B (FIG. 16: A and B) show indel levels of GEBx0328 targeting endogenous genes with modified RNAs scaffold (n=3);

[0124] FIG. 17: A and B (FIG. 17: A and B) show indel levels of GEBx0328 targeting endogenous genes under optimal conditions (n=3);

[0125] FIG. 18 (FIG. 18) shows the indel levels of GEBx0305 targeting endogenous genes following transfection of HEK293T cell with lipoplex comprising a fixed amount (20 ng) of sgRNA and different ratios of mRNA. SpCas9 is used as positive control;

[0126] FIG. 19 (FIG. 19) shows the indel levels of GEBx0308 targeting endogenous genes following transfection of HEK293T cell with lipoplex comprising a fixed amount (20 ng) of sgRNA and different ratios of mRNA;

[0127] FIG. 20 (FIG. 20) shows the indel levels of GEBx0305 targeting endogenous genes following transfection of PHH cell with lipoplex comprising a fixed amount (20 ng) of sgRNA and different ratios of mRNA. SpCas9 is used as positive control;

[0128] FIG. 21 (FIG. 21) shows the indel levels of GEBx0308 targeting endogenous genes following transfection of PHH cell with lipoplex comprising a fixed amount (20 ng) of sgRNA and different ratios of mRNA;

[0129] FIG. 22 (FIG. 22) shows the summary of top Guide-seq insertion sites of GEBx0305 targeting (CFTR-NGGAAAA-T5) and site 2 (EMX1-NGGAAAA-T5); the sequences shown in the figure are SEQ ID NOs: 907-910;

[0130] FIG. 23 (FIG. 23) shows the summary of top Guide-seq insertion sites of GEBx0308 targeting site 1 (CD34-NGGTACT-T4) and site 2 (POLQ-NGGTACT-T1); the sequences shown in the figure are SEQ ID NOs: 911-914;

[0131] FIG. 24 (FIG. 24) shows the summary of top Guide-seq insertion sites of GEBx0328 targeting (CFTR-NGGCCT-T3) and site 2 (CFTR-NGGCCT-T5); the sequences shown in the figure are SEQ ID NOs: 915-919;

[0132] FIG. 25 (FIG. 25) shows the A to G conversion base editing frequency in HEK293T cells by GEBx0305-ABE at adenines for four sites;

[0133] FIG. 26 (FIG. 26) shows the A to G conversion base editing frequency in HEK293T cells by GEBx0308-ABE at adenines for five sites;

[0134] FIG. 27 (FIG. 27) shows the A to G conversion base editing frequency in HEK293T cells by GEBx0328-ABE at adenines for five sites.

[0135] FIG. 28 (FIG. 28) shows 4-Allele specific editing of GEBx0308 at RHO-P23H pathogenic site; the sequences shown in the figure are SEQ ID NOs: 920-923.

### DETAILED DESCRIPTION OF THE PREFERRED EMBODIMENT

[0136] The following examples further illustrate the present disclosure, but the present disclosure is not limited thereto.

[0137] It must be noted that as used herein and in the appended claims, the singular forms or the terms “a”, “an”, “the”, and “said” and similar terms used in the context of the present disclosure (especially in the context of the claims) are to be construed to cover both the singular and plural unless otherwise indicated herein or clearly contradicted by the context. In some embodiments, the above terms can be reasonably comprehended as “one” or “one or more”. Further, unless otherwise required by context, singular terms shall include pluralities and plural terms shall include the singular.

[0138] Unless otherwise indicated, it is intended that all singular/plural terms also encompass the active tense and past tense forms of a term, and it needs to be understood according to the context in the article.

[0139] It is noted that in this disclosure and particularly in the claims and/or paragraphs, terms such as “comprises”, “comprised”, “comprising” and the like can have the meaning attributed to it in U.S. Patent law; e.g., they can mean “includes”, “included”, “including”, and the like; and those terms such as “consisting essentially of” and “consists essentially of” have the meaning ascribed to them in U.S. Patent law. The term “a group consisting of” and the like refers to a specific set or collection of elements, components, or features. It may include one or more of the specified elements, components, or features. For example, a group consisting of: A, B, or C may refer to a set that includes any one or more of the specified elements A, B, or C. The claim encompasses the possibility of having any single element (A, B, or C) individually, any two elements combined (A and B, A and C, or B and C), or all three elements together (A, B, and C). This phrase defines the invention in terms of its variability within the specified options, allowing for different combinations of the listed elements while still maintaining the claimed scope.

[0140] When “t” or “T” appears in a sequence in this invention as a nucleotide of an RNA sequence, it should be understood as “u” or “U”.

[0141] The term “identity” in the context of two or more nucleic acids or polypeptide sequences refers to two or more sequences or subsequences that are the same or have a specified percentage of amino acid residues or nucleotides that are the same as measured using a BLAST or BLAST 2.0 or FASTA etc. sequence comparison algorithms with default parameters described below.

[0142] The term “exemplary” is used herein to mean serving as an example, instance, or illustration. Any aspect or design described herein as “exemplary” is not necessarily to be construed as preferred or advantageous over other aspects, embodiments, or designs.

[0143] As used herein, the term “optional” or “optionally” means that the subsequent described event, circumstance or substituent may or may not occur, and that the description includes instances where the event or circumstance occurs and instances where it does not.

[0144] The use of “or” or “/” is inclusive and means “and/or” unless stated otherwise; or it could be interpreted differently based on the context. The term “and/or” as used herein a phrase such as “A and/or B” is intended to include both A and B; A or B; A (alone); and B (alone). Likewise, the term “and/or” as used herein a phrase such as “A, B, and/or C” is intended to encompass each of the following embodiments: A, B, and C; A, B, or C; A or C; A or B; B or C; A and C; A and B; B and C; A (alone); B (alone); and C (alone).

[0145] The terms “about”, “˜” as used herein when referring to a measurable value such as a parameter, an amount, a temporal duration, and the like, are meant to encompass variations of and from the specified value It is to be understood that the value to which the modifier “about” or refers is itself also specifically, and preferably, disclosed.

[0146] The term “exemplary” is used herein to mean serving as an example, instance, or illustration. Any aspect or design described herein as “exemplary” is not necessarily to be construed as preferred or advantageous over other aspects, embodiments, or designs.

[0147] The terms “subject”, “individual” and “patient” are used interchangeably herein to refer to a vertebrate, preferably a mammal, more preferably a human. Mammals include, but are not limited to mice, simians, humans, farm animals, sport animals, and pets. Tissues, cells and their progeny of a biological entity obtained in vivo or cultured in vitro are also encompassed.

[0148] “Variant” of sequence disclosed herein include sequence having one or more additions, deletions, stop positions, or substitutions, as compared to a sequence disclosed herein.

[0149] “Encoding” refers to the property of specific sequences of nucleotides in a gene, such as a cDNA, or an mRNA, to serve as templates for synthesis of other macromolecules such as a defined sequence of amino acids. Thus, a gene codes for a protein if transcription and translation of mRNA corresponding to that gene produces the protein in a cell or other biological system. A polynucleotide encoding a protein includes all nucleotide sequences that are degenerate versions of each other and that code for the same amino acid sequence or amino acid sequences of substantially similar form and function.

[0150] The terms “non-naturally occurring” or “engineered” are used interchangeably and indicate the involvement of the hand of man. The terms, when referring to nucleic acid molecules or polypeptides mean that the nucleic acid molecule or the polypeptide is at least substantially free from at least one other component with which they are naturally associated in nature and as found in nature. In all aspects and embodiments, whether they include these terms or not, it will be understood that, preferably, may be optional and thus preferably included or not preferably included. Furthermore, the terms “non-naturally occurring” and “engineered” may be used interchangeably and so can therefore be used alone or in combination and one or other may replace mention of both together. In particular, “engineered” is preferred in place of “non-naturally occurring” or “non-naturally occurring and/or engineered” or “engineered, non-naturally occurring”.

[0151] As presented in this invention, the term “cleavage event” as used herein, refers to a DNA break in a target nucleic acid created by a type II Cas nuclease of a CRISPR system described herein. In some embodiments, the cleavage event is a double-stranded DNA break. In some embodiments, the cleavage event is a single-stranded DNA break.

[0152] As presented in this invention, the term “targeting” refers to the ability of a complex including a CRISPR-associated protein and an RNA guide, to preferentially or specifically bind to, e.g., hybridize to, a specific target nucleic acid compared to other nucleic acids that do not have the same or similar sequence as the target nucleic acid.

[0153] As presented in this disclosure, the term “GEBx” followed by a numerical suffix is utilized as a generic code to represent either nucleic acids or proteins. It is important to note that the use of identical codes for nucleic acids and proteins, or derivatives thereof, does not imply that the substances represented by these codes are identical. In other words, GEBx-0305 may refer to a specific nucleic acid sequence in one instance and a distinct protein in another. Some embodiments may illustrate a direct correspondence between the nucleic acid and protein denoted by the same or derived codes. Thus, the code “GEBx” serves as an indexing system to organize and reference the diverse biomolecules described in this disclosure, and the meaning of the code will be understood based on the context provided.

[0154] Unless otherwise defined herein, scientific, and technical terms used in connection with the present disclosure shall have the meanings that are commonly understood by those of ordinary skill in the art. The meaning and scope of the terms should be clear; in the event, however of any latent ambiguity, definitions provided herein take precedent over any dictionary or extrinsic definition.

[0155] Various embodiments are described hereinafter. It should be noted that the specific embodiments are not intended as an exhaustive description or as a limitation to the broader aspects discussed herein. One aspect described in conjunction with a particular embodiment is not necessarily limited to that embodiment and can be practiced with any other embodiment(s). Reference throughout this specification to “in some embodiment(s)”, “in certain embodiment (s)”, “in some preferred embodiments”, “in some typical embodiment(s)”, “in typical embodiment(s)” or similar expressions means that a particular feature, structure or characteristic described in connection with the embodiment is included in at least one embodiment of the present disclosure. Furthermore, a particular features, structures or characteristics may be combined in any suitable manner, as would be apparent to a person skilled in the art from this disclosure, in one or more embodiments. Furthermore, while some embodiments described herein include some but not other features included in other embodiments, combinations of features of different embodiments are meant to be within the scope of the disclosure. For example, in the appended claims, any one of the claimed embodiments can be used in any combination.

[0156] The recitation of numerical ranges by endpoints includes all numbers and fractions subsumed within the respective ranges, as well as the recited endpoints.

[0157] Various embodiments are described hereinafter. It should be noted that the specific embodiments are not intended as an exhaustive description or as a limitation to the broader aspects discussed herein. One aspect described in conjunction with a particular embodiment is not necessarily limited to that embodiment and can be practiced with any other embodiment(s). Reference throughout this specification to “in a specific embodiment”, “in some embodiment”, “in certain embodiment” means that a particular feature, structure or characteristic described in connection with the embodiment is included in at least one embodiment of the present disclosure. Thus, appearances of the phrases “a specific embodiment”, “in one embodiment” or “in certain embodiment” in various places throughout this specification are not necessarily all referring to the same embodiment, but may. Furthermore, a particular features, structures or characteristics may be combined in any suitable manner, as would be apparent to a person skilled in the art from this disclosure, in one or more embodiments. Furthermore, while some embodiments described herein include some but not other features included in other embodiments, combinations of features of different embodiments are meant to be within the scope of the disclosure. For example, in the appended claims, any one of the claimed embodiments can be used in any combination.

[0158] All publications, published patent documents, and patent applications cited herein are hereby incorporated by reference to the same extent as though each individual publication, published patent document, or patent application was specifically and individually indicated as being incorporated by reference.

[0159] This invention provides an engineered, non-naturally occurring Type II CRISPR-associated (Cas) protein having a sequence identity of at least 70% to the amino acid sequence of any one of SEQ ID NOs: 1-71, or a variant thereof. In some embodiments, the Cas protein having a sequence identity of at least 75%, 80%, 85%, 90%, 92%, 95%, 98%, 99% or 100% to the amino acid sequence of any one of SEQ ID NOs: 1-71.

[0160] As presented in this invention, the “M” referred to herein stands for the starting amino acid Methionine, which is typically the initiating point for protein synthesis in many proteins. Naturally occurring Cas proteins often begin with Methionine as the first amino acid in their sequence. However, when scientists engineer these proteins, such as by fusing them with a Nuclear Localization Signal (NLS) or other domains, this initial amino acid “M” might be replaced or altered to introduce new functionalities or characteristics.

[0161] In this disclosure, particular attention has been given to the flexibility and functionality of the engineered Cas protein. Except for the intentional modification of the starting amino acid, Methionine (M), at position 1, designed Cas protein exhibits a significant sequence identity—ranging from 70% to 100%—when compared to the reference sequences. This strategic alteration not only aligns with our goal of tailoring the protein's properties but also ensures that the core or expected functionalities intrinsic to the Cas protein are preserved. By manipulating the initial amino acid without compromising the overall sequence similarity, some specific attributes are enhanced, such as improving cellular localization or introducing other advantageous features, while maintaining the fundamental characteristics that make Cas proteins indispensable tools in genomic manipulation.

[0162] This invention also provides an engineered, non-naturally occurring Type II CRISPR-associated (Cas) protein, wherein the Cas protein has a sequence identity of at least 70%, 75%, 80%, 85%, 90%, 92%, 95%, 98%, 99%, or 100% to the amino acid sequence of any one of SEQ ID NOs: 1-71, with the exception of the amino acid “M” at position 1 of the sequence.

[0163] As presented in this disclosure, the term “Cas protein”, “CRISPR-associated protein” or other similar terms refers to a class of CRISPR-associated proteins that are integral components of the CRISPR-Cas system. These proteins can possess intrinsic nuclease activity, enabling them to cleave double-stranded DNA or RNA molecules in a sequence-specific manner guided by a complementary RNA molecule, such as Cas9 and Cas12, which have been extensively utilized for genome editing applications. Additionally, some Cas proteins may be engineered to retain only one of the two active sites required for double-stranded cleavage, resulting in nickase activity, allowing them to introduce single-strand breaks in target nucleic acid sequences for controlled cleavage events. Furthermore, certain Cas proteins may be modified to lack any inherent nuclease activity, referred to as dead Cas or nuclease-inactive Cas proteins. Despite the absence of enzymatic function, these dead Cas proteins maintain their ability to bind specifically to target nucleic acid sequences and are often used in conjunction with other effector domains (or functional domains) for applications such as gene regulation, epigenome editing, and as components of advanced imaging systems. In some embodiments, the Cas protein may be used to reduce off-target effects. In some embodiments, the active Cas nuclease, nickase or dead Cas may also be part of a fusion protein containing another effector domain. The fusion proteins comprising such other effector domains (or functional domains) and such active Cas nuclease, nickase or dead Cas are also involved in the scope of the Cas protein. In some embodiments, the Cas protein may be a split form. In some embodiments, the Cas protein may also be an inducible Cas protein. In some embodiments, the type II Cas protein may be part of a self-inactivating system (SIN). In some embodiments, the type II Cas nuclease may also be part of a synergistic activator system (SAM) as defined herein elsewhere.

[0164] In some embodiments, the domain arrangement of Type II Cas protein the Cas protein contains a RuvC domain, BH (bridge helix) domain, REC domain, HNH domain, and/or a CTD (C-terminal domain). The RuvC domain is a critical catalytic site responsible for the cleavage of target DNA strands. It contains three split RuvC sub-domains, which are intricately folded to form the active site where DNA cleavage occurs. These sub-domains work in coordination to recognize and cleave the DNA at specific locations directed by the guide RNA. The BH domain, or bridge helix domain, serves as a structural link between the different domains of the Cas protein. It is characterized as an arginine-rich region comprising numbers of arginine amino acids. This abundance of arginine residues is crucial for interactions with the phosphate backbone of the target DNA strand. The arginine residues can form hydrogen bonds with the phosphate groups, aiding in the proper positioning and alignment of the target DNA for cleavage. The REC domain, or recognition lobe, is involved in the recognition of the target DNA sequence. It contributes to the specificity of the Cas protein by distinguishing between target and non-target sequences, ensuring that only the intended DNA segments are cleaved. The HNH domain is another catalytic site that works in conjunction with the RuvC domain to cleave the complementary strand of the target DNA. It is named after its characteristic histidine-asparagine-histidine sequence and is essential for the nuclease activity of the Cas protein. The CTD, or C-terminal domain, is often involved in interactions with other proteins or cellular structures, contributing to the localization and regulation of the Cas protein within the cell. It may also play a role in the stability and overall conformation of the Cas protein, ensuring that it remains functional and specific in its targeting. The complex domain arrangement allows the Type II Cas protein to carry out its precise and crucial function within the CRISPR system, making it an invaluable tool for genome editing and manipulation.

[0165] In some embodiments, the Cas protein further comprises an effector domain (or functional domain). Such effector domains can have one or more types of enzymatic activities, including polymerase activity, ligase activity, reverse transcriptase activity, deaminase activity, replication activity, or proofreading activity. In some embodiment, the effector domains domain comprises a nuclease, a nickase, a deaminase, a reverse transcriptase, a recombinase, a methyltransferase, a methylase, an acetylase, an acetyltransferase, a transcriptional activator, a transcriptional repressor domain, a cryptochrome, a light inducible/controllable domain, or a chemically inducible/controllable domain.

[0166] In some embodiments, the Cas protein further comprises one or more of a nuclear localization signal sequence, a nuclear export signal sequence, a cell penetrating peptide sequence, an affinity tag. the type II Cas protein comprises one or more nuclear localization signal(s) NLS(s). The NLS(s) can locate at the end or other portion of the peptide. The NLS(s) located each end or other portion of the Cas9 amino acid sequence can be same or not. In some embodiments, the NLS of the N-terminal end and the NLS of the C-terminal end are the same. In some embodiments, the NLS of the N-terminal end and the NLS of the C-terminal end are different. In some embodiments, the N-terminal end of the Cas9 amino acid sequence comprising one NLS and the C-terminal end of the Cas9 amino acid sequence comprising one NLS. The amino acid sequence of NLS fused to the N-terminal end and/or the C-terminal end of the Cas9 amino acid sequence respectively. NLS maybe an SV40 (simian virus 40) NLS, c-Myc NLS, or other suitable monopartite NLS. The NLS may be fused to an N-terminal and/or a C-terminal of the Cas protein. In some embodiments, an affinity tag (such as GST, FLAG or hexahistidine sequences) is utilized for purification of the Cas protein by affinity chromatography. In some embodiments, the amino acid sequence of C-terminal NLS is set forth in SEQ ID NO: 881 or 882. In some embodiments, the amino acid sequence of the C-terminal FLAG sequence is set forth in SEQ ID NO: 883. Other available sequences and different combinations can also be chosen for the NLSs sequences and FLAG sequence.

[0167] In some embodiments, the Cas protein, the Cas protein comprises an amino acid sequence having at least 70%, 71%, 72%, 73%, 74%, 75%, 76%, 77%, 78%, 79%, 80%, 81%, 82%, 83%, 84%, 85%, 86%, 87%, 88%, 89%, 90%, 91%, 92%, 93%, 94%, 95%, 96%, 97%, 98%, 99%, or 100% sequence identity to the amino acid sequence of any one of SEQ ID NOs: 1-71.

[0168] In some preferred embodiments, the Cas protein has a sequence identity of at least 70%, 71%, 72%, 73%, 74%, 75%, 76%, 77%, 78%, 79%, 80%, 81%, 82%, 83%, 84%, 85%, 86%, 87%, 88%, 89%, 90%, 91%, 92%, 93%, 94%, 95%, 96%, 97%, 98%, 99%, or 100% to the amino acid sequence of SEQ ID NO: 9, 12, 19, 21, 22, 24, 25, 27, 29, 30, 31, 36, 37, 38, 43, 44, 51, 56, 59, 60, 68). In some other preferred embodiments, the Cas protein has a sequence identity of at least 70%, 71%, 72%, 73%, 74%, 75%, 76%, 77%, 78%, 79%, 80%, 81%, 82%, 83%, 84%, 85%, 86%, 87%, 88%, 89%, 90%, 91%, 92%, 93%, 94%, 95%, 96%, 97%, 98%, 99%, or 100% to the amino acid sequence of any one of SEQ ID NOs: 9, 12, 19, 21, 22, 24, 25, 27, 29, 30, 31, 36, 37, 38, 43, 44, 51, 56, 59, 60, and 68, with the exception of the amino acid “M” at position 1 of the sequence.

[0169] One of the key elements of the CRISPR-Cas system associated modification process is the Protospacer Adjacent Motif (PAM), a short DNA sequence immediately adjacent to the target DNA sequence. The PAM sequence is essential for Cas protein binding and cleavage activity, ensuring that only the intended DNA sequences are targeted for editing. The ability of the Cas protein to recognize these specific PAM sequences is due to its unique structural features and binding interactions with the DNA. Each PAM sequence provides a distinct motif that the Cas protein can identify, ensuring accurate and efficient targeting. For example, the NRRANH sequence may offer a specific arrangement of nucleotides that the Cas protein can bind to with high affinity. These diverse range of PAM sequences expands the potential applications of the CRISPR-Cas system. It enables researchers and scientists to target a wider variety of DNA sequences for editing, increasing the versatility and effectiveness of this powerful gene-editing tool. Additionally, understanding these PAM sequences can aid in the development of more advanced Cas proteins with even greater targeting capabilities, further advancing the field of gene editing and its potential benefits for research, medicine, and biotechnology. The Cas protein, as disclosed in this invention, exhibits a unique capability to recognize a diverse range of PAM sequences. These sequences include NRRANH, NRHACT, NRAAR, NNNCCY, NNRYYYY, NGG, NNNNCAA, NRNACN, NNGR, NGGNR, NNNCCH, NRRAAG, NRHRAC, NRYART, NRHACC, NRAAR, NRNVHH, YMACAW, NAHAA, NRHAYY, or NGGHA. This specific recognition of these Cas proteins allows for greater flexibility in selecting target DNA sequences for editing.

[0170] As presented in this invention, in the PAM sequences provided, N: Represents any one of the four standard DNA nucleotides: Adenine (A), Thymine (T), Cytosine (C), or Guanine (G). This code facilitates the inclusion of any nucleotide at a given position without the need to specify it individually; R: Stands specifically for purine nucleotides, either Adenine (A) or Guanine (G). Purines are critical in DNA structure and function, and this code simplifies the incorporation of these larger nucleotides into PAM sequences; H: Denotes any nucleotide except Guanine (G). It can therefore represent Adenine (A), Thymine (T), or Cytosine (C). This code is useful for excluding Guanine (G) in specific positions where its larger size may impact structural or functional aspects of the sequence. Y: Indicates pyrimidine nucleotides, being either Thymine (T) or Cytosine (C). Pyrimidines are often found in specific regions of DNA and RNA, and this code aids in their inclusion without specifying the exact nucleotide. W: Represents weak bases, which can be either Adenine (A) or Thymine (T). This distinction is biochemically relevant as Adenine and Thymine have similar properties in certain contexts, such as hydrogen bonding. V: Reflects any nucleotide except Thymine (T), thus including Adenine (A), Cytosine (C), or Guanine (G). This code assists in situations where Thymine is not preferred or needed due to its unique chemical properties among the pyrimidines. M: Represents either Adenine (A) or Cytosine (C).

[0171] In some embodiments, the Cas protein, as disclosed in this invention, is capable of recognizing at least one protospacer adjacent motif (PAM) having or comprising a sequence of: NRRANH, NRHACT, NRAAR, NNNCCY, NNRYYYY, NGG, NNNNCAA, NRNACN, NNGR, NGGNR, NNNCCH, NRRAAG, NRHRAC, NRYART, NRHACC, NRAAR, NRNVHH, YMACAW, NAHAA, NRHAYY, or NGGHA. In some embodiments, the Cas protein has a sequence identity of at least 70%, 71%, 72%, 73%, 74%, 75%, 76%, 77%, 78%, 79%, 80%, 81%, 82%, 83%, 84%, 85%, 86%, 87%, 88%, 89%, 90%, 91%, 92%, 93%, 94%, 95%, 96%, 97%, 98%, 99%, or 100% to the amino acid sequence of SEQ ID NO: 9, and is capable of recognizing a protospacer adjacent motif (PAM) having a sequence of: NRRANH. In some embodiments, the Cas protein has a sequence identity of at least 70%, 71%, 72%, 73%, 74%, 75%, 76%, 77%, 78%, 79%, 80%, 81%, 82%, 83%, 84%, 85%, 86%, 87%, 88%, 89%, 90%, 91%, 92%, 93%, 94%, 95%, 96%, 97%, 98%, 99%, or 100% to the amino acid sequence of SEQ ID NO: 12, and is capable of recognizing a protospacer adjacent motif (PAM) having a sequence of: NRHACT. In some embodiments, the Cas protein has a sequence identity of at least 70%, 71%, 72%, 73%, 74%, 75%, 76%, 77%, 78%, 79%, 80%, 81%, 82%, 83%, 84%, 85%, 86%, 87%, 88%, 89%, 90%, 91%, 92%, 93%, 94%, 95%, 96%, 97%, 98%, 99%, or 100% to the amino acid sequence of SEQ ID NO: 19, and is capable of recognizing a protospacer adjacent motif (PAM) having a sequence of: NRAAR. In some embodiments, the Cas protein has a sequence identity of at least 70%, 71%, 72%, 73%, 74%, 75%, 76%, 77%, 78%, 79%, 80%, 81%, 82%, 83%, 84%, 85%, 86%, 87%, 88%, 89%, 90%, 91%, 92%, 93%, 94%, 95%, 96%, 97%, 98%, 99%, or 100% to the amino acid sequence of SEQ ID NO: 21, and is capable of recognizing a protospacer adjacent motif (PAM) having a sequence of: NNNCCY In some embodiments, the Cas protein has a sequence identity of at least 70%, 71%, 72%, 73%, 74%, 75%, 76%, 77%, 78%, 79%, 80%, 81%, 82%, 83%, 84%, 85%, 86%, 87%, 88%, 89%, 90%, 91%, 92%, 93%, 94%, 95%, 96%, 97%, 98%, 99%, or 100% to the amino acid sequence of SEQ ID NO: 22, and is capable of recognizing a protospacer adjacent motif (PAM) having a sequence of: NNRYYYY In some embodiments, the Cas protein has a sequence identity of at least 70%, 71%, 72%, 73%, 74%, 75%, 76%, 77%, 78%, 79%, 80%, 81%, 82%, 83%, 84%, 85%, 86%, 87%, 88%, 89%, 90%, 91%, 92%, 93%, 94%, 95%, 96%, 97%, 98%, 99%, or 100% to the amino acid sequence of SEQ ID NO: 24, and is capable of recognizing a protospacer adjacent motif (PAM) having a sequence of: NGG. In some embodiments, the Cas protein has a sequence identity of at least 70%, 71%, 72%, 73%, 74%, 75%, 76%, 77%, 78%, 79%, 80%, 8%1%, 82%, 83%, 84%, 85%, 86%, 87%, 88%, 89%, 90%, 91%, 92%, 93%, 94%, 95%, 96%, 97%, 98%, 99%, or 100% to the amino acid sequence of SEQ ID NO: 25, and is capable of recognizing a protospacer adjacent motif (PAM) having a sequence of: NNNNCAA. In some embodiments, the Cas protein has a sequence identity of at least 70%, 71%, 72%, 73%, 74%, 75%, 76%, 77%, 78%, 79%, 80%, 81%, 82%, 83%, 84%, 85%, 86%, 87%, 88%, 89%, 90%, 91%, 92%, 93%, 94%, 95%, 96%, 97%, 98%, 99%, or 100% to the amino acid sequence of SEQ ID NO: 27, and is capable of recognizing a protospacer adjacent motif (PAM) having a sequence of: NRNACN. In some embodiments, the Cas protein has a sequence identity of at least 70%, 71%, 72%, 73%, 74%, 75%, 76%, 77%, 78%, 79%, 80%, 81%, 82%, 83%, 84%, 85%, 86%, 87%, 88%, 89%, 90%, 91%, 92%, 93%, 94%, 95%, 96%, 97%, 98%, 99%, or 100% to the amino acid sequence of SEQ ID NO: 29, and is capable of recognizing a protospacer adjacent motif (PAM) having a sequence of: NNGR. In some embodiments, the Cas protein has a sequence identity of at least 70%, 71%, 72%, 73%, 74%, 75%, 76%, 77%, 78%, 79%, 80%, 81%, 82%, 83%, 84%, 85%, 86%, 87%, 88%, 89%, 90%, 91%, 92%, 93%, 94%, 95%, 96%, 97%, 98%, 99%, or 100% to the amino acid sequence of SEQ ID NO: 30, and is capable of recognizing a protospacer adjacent motif (PAM) having a sequence of: NGGNR. In some embodiments, the Cas protein has a sequence identity of at least 70%, 71%, 72%, 73%, 74%, 75%, 76%, 77%, 78%, 79%, 80%, 81%, 82%, 83%, 84%, 85%, 86%, 87%, 88%, 89%, 90%, 91%, 92%, 93%, 94%, 95%, 96%, 97%, 98%, 99%, or 100% to the amino acid sequence of SEQ ID NO: 31, and is capable of recognizing a protospacer adjacent motif (PAM) having a sequence of: NNNCCH. In some embodiments, the Cas protein has a sequence identity of at least 770%, 71%, 72%, 73%, 74%, 75%, 76%, 77%, 78%, 79%, 80%, 81%, 82%, 83%, 84%, 85%, 86%, 87%, 88%, 89%, 90%, 91%, 92%, 93%, 94%, 95%, 96%, 97%, 98%, 99%, or 100% to the amino acid sequence of SEQ ID NO: 36, and is capable of recognizing a protospacer adjacent motif (PAM) having a sequence of: NRRAAG. In some embodiments, the Cas protein has a sequence identity of at least 70%, 71%, 72%, 73%, 74%, 75%, 76%, 77%, 78%, 79%, 80%, 81%, 82%, 83%, 84%, 85%, 86%, 87%, 88%, 89%, 90%, 91%, 92%, 93%, 94%, 95%, 96%, 97%, 98%, 99%, or 100% to the amino acid sequence of SEQ ID NO: 37, and is capable of recognizing a protospacer adjacent motif (PAM) having a sequence of: NRHRAC. In some embodiments, the Cas protein has a sequence identity of at least 70%, 71%, 72%, 73%, 74%, 75%, 76%, 77%, 78%, 79%, 80%, 81%, 82%, 83%, 84%, 85%, 86%, 87%, 88%, 89%, 90%, 91%, 92%, 93%, 94%, 95%, 96%, 97%, 98%, 99%, or 100% to the amino acid sequence of SEQ ID NO: 38, and is capable of recognizing a protospacer adjacent motif (PAM) having a sequence of: NRYART. In some embodiments, the Cas protein has a sequence identity of at least 70%, 71%, 72%, 73%, 74%, 75%, 76%, 77%, 78%, 79%, 80%, 81%, 82%, 83%, 84%, 85%, 86%, 87%, 88%, 89%, 90%, 91%, 92%, 93%, 94%, 95%, 96%, 97%, 98%, 99%, or 100% to the amino acid sequence of SEQ ID NO: 43, and is capable of recognizing a protospacer adjacent motif (PAM) having a sequence of: NRHACC. In some embodiments, the Cas protein has a sequence identity of at least 70%, 71%, 72%, 73%, 74%, 75%, 76%, 77%, 78%, 79%, 80%, 81%, 82%, 83%, 84%, 85%, 86%, 87%, 88%, 89%, 90%, 91%, 92%, 93%, 94%, 95%, 96%, 97%, 98%, 99%, or 100% to the amino acid sequence of SEQ ID NO: 44, and is capable of recognizing a protospacer adjacent motif (PAM) having a sequence of: NRAAR. In some embodiments, the Cas protein has a sequence identity of at least 70%, 71%, 72%, 73%, 74%, 75%, 76%, 77%, 78%, 79%, 80%, 81%, 82%, 83%, 84%, 85%, 86%, 87%, 88%, 89%, 90%, 91%, 92%, 93%, 94%, 95%, 96%, 97%, 98%, 99%, or 100% to the amino acid sequence of SEQ ID NO: 51, and is capable of recognizing a protospacer adjacent motif (PAM) having a sequence of: NRNVHH. In some embodiments, the Cas protein has a sequence identity of at least 70%, 71%, 72%, 73%, 74%, 75%, 76%, 77%, 78%, 79%, 80%, 81%, 82%, 83%, 84%, 85%, 86%, 87%, 88%, 89%, 90%, 91%, 92%, 93%, 94%, 95%, 96%, 97%, 98%, 99%, or 100% to the amino acid sequence of SEQ ID NO: 56, and is capable of recognizing a protospacer adjacent motif (PAM) having a sequence of: YMACAW. In some embodiments, the Cas protein has a sequence identity of at least 70%, 71%, 72%, 73%, 74%, 75%, 76%, 77%, 78%, 79%, 80%, 81%, 82%, 83%, 84%, 85%, 86%, 87%, 88%, 89%, 90%, 91%, 92%, 93%, 94%, 95%, 96%, 97%, 98%, 99%, or 100% to the amino acid sequence of SEQ ID NO: 59, and is capable of recognizing a protospacer adjacent motif (PAM) having a sequence of: NAHAA. In some embodiments, the Cas protein has a sequence identity of at least 70%, 71%, 72%, 73%, 74%, 75%, 76%, 77%, 78%, 79%, 80%, 81%, 82%, 83%, 84%, 85%, 86%, 87%, 88%, 89%, 90%, 91%, 92%, 93%, 94%, 95%, 96%, 97%, 98%, 99%, or 100% to the amino acid sequence of SEQ ID NO: 60, and is capable of recognizing a protospacer adjacent motif (PAM) having a sequence of: NRHAYY. In some embodiments, the Cas protein has a sequence identity of at least 70%, 71%, 72%, 73%, 74%, 75%, 76%, 77%, 78%, 79%, 80%, 81%, 82%, 83%, 84%, 85%, 86%, 87%, 88%, 89%, 90%, 91%, 92%, 93%, 94%, 95%, 96%, 97%, 98%, 99%, or 100% to the amino acid sequence of SEQ ID NO: 68, and is capable of recognizing a protospacer adjacent motif (PAM) having a sequence of: NGGHA.

[0172] As presented in this invention, the terms “recognized”, “recognizing”, or “recognition” in this context refers to the capability of the Cas protein to form a functional complex with a sgRNA at a DNA target site to which the sgRNA hybridizes (i.e. to which the spacer sequence of the sgRNA hybridizes) and being flanked by the PAM sequence, and wherein the Cas protein is capable of performing its natural function, i.e. DNA cleavage or DNA binding. In this context it is to be noted that such DNA cleavage precludes the type II Cas protein from being a catalytically inactive type II Cas nuclease. In the case of for instance an inactivated type II Cas nuclease (e.g. a dead type II Cas nuclease), a complex between the type II Cas nuclease, sgRNA and cognate target may nevertheless be formed if the required PAM sequence is present, but such does not result in DNA cleavage.

[0173] In some embodiments, the Cas protein is a nickase or dead Cas protein. The DNA cleavage domain of an active Cas protein in this invention include two subdomains, the HNH nuclease subdomain and the RuvC subdomain. Mutations within these subdomains can silence the nuclease activity of the Cas protein. In some embodiments, Cas protein has a sequence identity of at least 70%, 71%, 72%, 73%, 74%, 75%, 76%, 77%, 78%, 79%, 80%, 81%, 82%, 83%, 84%, 85%, 86%, 87%, 88%, 89%, 90%, 91%, 92%, 93%, 94%, 95%, 96%, 97%, 98%, 99%, or 100% to the amino acid sequence of SEQ ID NO: 9, and includes a mutation at residue D11 or H859; or has a sequence identity of at least 70%, 71%, 72%, 73%, 74%, 75%, 76%, 77%, 78%, 79%, 80%, 81%, 82%8, 83%, 84%, 85%, 86%, 87%, 88%, 89%, 90%, 91%, 92%, 93%, 94%, 95%, 96%, 97%, 98%, 99%, or 100% to the amino acid sequence of SEQ ID NO: 12, and includes a mutation at residue D10 or H862; or has a sequence identity of at least 70%, 71%, 72%, 73%, 74%, 75%, 76%, 77%, 78%, 79%, 80%, 81%, 82%, 83%, 84%, 85%, 86%, 87%, 88%, 89%, 90%, 91%, 92%, 93%, 94%, 95%, 96%, 97%, 98%, 99%, or 100% to the amino acid sequence of SEQ ID NO: 31, and includes a mutation at D12 or H903. In some embodiments, the Cas protein has a sequence identity of at least 70%, 71%, 72%, 73%, 74%, 75%, 76%, 77%, 78%, 79%, 80%, 81%, 82%, 83%, 84%, 85%, 86%, 87%, 88%, 89%, 90%, 91%, 92%, 93%, 94%, 95%, 96%, 97%, 98%, 99%, or 100% to the amino acid sequence of SEQ ID NO: 9, and includes a mutation at residue D11 or H859, with the exception of the amino acid “M” at position 1 of the sequence; or has a sequence identity of at least 70%, 71%, 72%, 73%, 74%, 75%, 76%, 77%, 78%, 79%, 80%, 81%, 82%, 83%, 84%, 85%, 86%, 87%, 88%, 89%, 90%, 91%, 92%, 93%, 94%, 95%, 96%, 97%, 98%, 99%, or 100% to the amino acid sequence of SEQ ID NO: 12, and includes a mutation at residue D10 or H862, with the exception of the amino acid “M” at position 1 of the sequence; or has a sequence identity of at least 70%, 71%, 72%, 73%, 74%, 75%, 76%, 77%, 78%, 79%, 80%, 81%, 82%, 83%, 84%, 85%, 86%, 87%, 88%, 89%, 90%, 91%, 92%, 93%, 94%, 95%, 96%, 97%, 98%, 99%, or 100% to the amino acid sequence of SEQ ID NO: 31, and includes a mutation at D12 or H903, with the exception of the amino acid “M” at position 1 of the sequence. In some embodiments, the mutation at residue D11 or H859 of SEQ ID NO: 9 is D11A or H859A; the mutation at residue D10 or H862 of SEQ ID NO: 12 is D10A or H862A; or the mutation at residue D12 or H903 of SEQ ID NO: 31 is D12A or H903A. In some embodiments, the Cas protein has a sequence identity of at least 70%, 71%, 72%, 73%, 74%, 75%, 76%, 77%, 78%, 79%, 80%, 81%, 82%, 83%, 84%, 85%, 86%, 87%, 88%, 89%, 90%, 91%, 92%, 93%, 94%, 95%, 96%, 97%, 98%, 99%, or 100% to the amino acid sequence of any one of SEQ ID NOs: 869-877.

[0174] This invention also provides an engineered, non-naturally occurring polynucleotide encoding the Type II CRISPR-associated (Cas) protein as disclosed in this invention.

[0175] As presented in this invention, the terms “polynucleotide” refers to a polymeric form of nucleotides of any length, either deoxyribonucleotides or ribonucleotides, or analogs thereof. Polynucleotides may have any three-dimensional structure, and may perform any function, known or unknown. Thus, this term includes, but is not limited to, single-, double-, or multi-stranded DNA or RNA, genomic DNA, cDNA, DNA-RNA hybrids, or a polymer comprising purine and pyrimidine bases or other natural, chemically or biochemically modified, non-natural, or derivatized nucleotide bases. In some embodiments, the polynucleotide encoding more than one portion of an expressed the type II Cas protein herein can be operably linked to each other and relevant regulatory sequences (such as promoters, enhancers, and termination regions). For example, there can be a functional linkage between a regulatory sequence and an exogenous nucleic acid sequence resulting in expression of the latter. For another embodiments, a first nucleic acid sequence can be operably linked with a second nucleic acid sequence when the first nucleic acid sequence is placed in a functional relationship with the second nucleic acid sequence. For instance, a promoter is operably linked to a coding sequence if the promoter affects the transcription or expression of the coding sequence. Generally, operably linked DNA sequences are contiguous and, where necessary or helpful, join coding regions, into the same reading frame. In some embodiments, the promoter is a constitutive promoter, a tissue-specific promoter, or an inducible promoter. In some embodiments, the term further can include all introns and other DNA sequences spliced from the mRNA transcript, along with variants resulting from alternative splice sites. These nucleic acid sequences may be a DNA strand sequence that is transcribed into RNA or an RNA sequence that is translated into protein. The nucleic acid sequences include both the full-length nucleic acid sequences as well as non-full-length sequences derived from the full-length protein. The sequences can also include degenerate codons of the native sequence or sequences that may be introduced to provide codon preference in a specific cell type.

[0176] In some embodiments, the polynucleotide encoding the Cas protein is operably linked to a promoter and is presented in a vector; optionally, the vector is selected from the group consisting of: a retroviral vector, a lentiviral vector, a phage vector, an adenoviral vector, an adeno-associated virus vector, a herpes simplex virus vector and a plasmid vector.

[0177] In some embodiments, the polynucleotide is a ribonucleotide sequence or a deoxyribonucleotide sequence, or analogs thereof, optionally, the polynucleotide is codon-optimized for expression in a cell of interest. In some embodiments, the polynucleotide is codon optimized for expression in a eukaryotic cell. In some embodiments, the eukaryotic cell is selected from the group consisting of: a plant cell, a fungal cell, a single cell eukaryotic organism, a mammalian cell, a reptile cell, an insect cell, an avian cell, a fish cell, a parasite cell, an arthropod cell, a cell of an invertebrate, a cell of a vertebrate, a rodent cell, a mouse cell, a rat cell, a primate cell, a non-human primate cell, and a human cell. In some embodiments, the cell is a mammalian cell, preferably a human cell. In some embodiments, the cell is a mammalian cell, preferably a human cell.

[0178] In some embodiments, the polynucleotide is an mRNA and further comprises a 5′ cap sequence and/or a poly-A tail sequence. In some embodiments of the present invention, the mRNA utilized may be modified to enhance its functional properties and stability. Specifically, in some embodiments, the modification process involves the substitution of uridine (represented by the letter “U”) with N1-Methylpseudouridine or pseudouridine. This substitution is designed to improve the mRNA's resistance to degradation by ribonucleases, potentially increasing its half-life and translational efficiency within the cell. The incorporation of N1-Methylpseudouridine or pseudouridine into the mRNA structure can also positively influence the immune response profile, as these modifications have been shown to reduce the immunogenicity of mRNA molecules when compared to their unmodified counterparts. This is particularly crucial for the development of mRNA-based therapeutics and vaccines, where minimizing adverse immune reactions is paramount.

[0179] In some embodiments, the polynucleotide in this invention is codon-optimized for expression in a eukaryotic cell; optionally, the eukaryotic cell is selected from the group consisting of: a plant cell, a fungal cell, a single-cell eukaryotic organism, a mammalian cell, a reptile cell, an insect cell, an avian cell, a fish cell, a parasite cell, an arthropod cell, a cell of an invertebrate, a cell of a vertebrate, a rodent cell, a mouse cell, a rat cell, a primate cell, a non-human primate cell, and/or a human cell.

[0180] In some embodiments, the polynucleotide has a sequence identity of at least 70%, 71%, 72%, 73%, 74%, 75%, 76%, 77%, 78%, 79%, 80%, 81%, 82%, 83%, 84%, 85%, 86%, 87%, 88%, 89%, 90%, 91%, 92%, 93%, 94%, 95%, 96%, 97%, 98%, 99%, or 100% to the nucleotide sequence of any one of SEQ ID NOs: 161-231, 241-311, 851-852, and 861-863.

[0181] This invention also provides an engineered, non-naturally occurring CRISPR-Cas system comprising: a) the Type II Cas protein described herein or the polynucleotide encoding the Cas protein thereof, b) at least one engineered guide RNA or at least one engineered nucleic acid encoding the guide RNA thereof, wherein said guide RNA comprises a spacer sequence that is complementary to a target nucleic acid and a Cas protein binding segment that interacts with said Cas protein, wherein the Cas protein binding segment comprises a tracrRNA sequence and a direct repeat (DR) sequence that hybridizes to form a double-stranded RNA (dsRNA) duplex.

[0182] As presented in this invention, the term “complementary” describes the ability of two nucleic acid strands to pair with each other through their bases. This complementarity can occur via perfect base-pairing, where each base along one strand forms a specific hydrogen-bonded pair with its complementary base on the opposite strand, following the standard Watson-Crick base pairing rules: adenine (A) pairs with thymine (T) or uracil (U), and cytosine (C) pairs with guanine (G). This perfect base-pairing allows for precise recognition and binding between the two strands. Additionally, complementarity can also involve imperfect base-pairing, which includes situations where mismatches, insertions, or deletions may lead to non-standard base pairing or reduced affinity between the strands. Despite these imperfections, the strands maintain enough complementarity to interact, albeit with potentially reduced specificity or stability in the duplex.

[0183] As presented in this invention, the direct repeat (DR) sequence originates from a short, repeated DNA sequence element within the CRISPR array. This sequence is typically interspersed between spacer sequences, which are derived from foreign genetic material such as phage or plasmid DNA. Upon transcription, the DR sequence is part of the pre-crRNA transcript and is processed into mature CRISPR RNA (crRNA). The DR sequence in the crRNA serves as a critical component that pairs with a complementary sequence in the trans-activating CRISPR RNA (tracrRNA) to form a double-stranded RNA (dsRNA) duplex. This duplex facilitates the binding of the Cas protein and is essential for the function of the guide RNA (gRNA) complex in the CRISPR/Cas system. In the context of the present invention, the DR sequence comprises the portion of the gRNA that hybridizes with the tracrRNA sequence to form the dsRNA duplex, thereby enabling the formation of the Cas protein binding segment. “hybridizes to form a double-stranded RNA (dsRNA) duplex”, or similar expressions, in this invention, refers to the process by which the direct repeat (DR) sequence of the CRISPR RNA (crRNA) pairs with a complementary sequence in the trans-activating CRISPR RNA (tracrRNA) to form a stable double-stranded RNA structure. This dsRNA duplex is a critical component of the guide RNA (gRNA) complex, which facilitates the binding of the Cas protein. Specifically, the DR sequence in the crRNA and the complementary sequence in the tracrRNA undergo base pairing, forming hydrogen bonds between their complementary bases, resulting in the formation of the dsRNA duplex. This duplex is essential for the function of the Cas protein binding segment, which comprises the tracrRNA sequence and the DR sequence that hybridizes to form the dsRNA duplex.

[0184] As presented in this invention, the term “target nucleic acid” refers to a specific nucleic acid substrate that contains a nucleic acid sequence complement to the entirety or a part of the spacer in an RNA guide. In some embodiments, the target nucleic acid comprises a gene or a sequence within a gene. In certain embodiments, the target nucleic acid comprises a noncoding region (e.g., a promoter). In a specific embodiment, the target nucleic acid is single-stranded. In a specific embodiment, the target nucleic acid is double-stranded. The term “target nucleic acid” or “target sequence” needs to be understood according to the context in the disclosure.

[0185] In some embodiments, the guide RNA is a dual guide RNA. In some embodiments, the guide RNA is a single guide RNA. In such embodiments, the guide RNA further comprises a linker sequence connecting the tracrRNA sequence and the DR sequence. In some typical embodiments, the linker comprises a short sequence of GAAA. In some embodiments, the linker serves as an artificial loop. In some embodiments, the sgRNA comprises, in an arrangement: a) a spacer sequence, which is capable of hybridizing to a sequence of the target nucleic acid to be manipulated; b) a DR sequence; c) a linker sequence and d) tracrRNA sequence. The tandem arrangement of the spacer sequence, the DR sequence; the linker sequence and tracrRNA sequence is in a 5′ to 3′ orientation, or in a 3′ to 5′ orientation. In some embodiments, the sgRNA scaffold comprises a sequence having at least 770%, 71%, 72%, 73%, 74%, 75%, 76%, 77%, 78%, 79%, 80%, 81%, 82%, 83%, 84%, 85%, 86%, 87%, 88%, 89%, 90%, 91%, 92%, 93%, 94%, 95%, 96%, 97%, 98%, 99%, or 100% identity to any one of SEQ ID NOs: 431-562.

[0186] In some embodiments, the sgRNA comprises a spacer sequence (such as any one of the sequences of SEQ ID NOs: 571-835, 885, and 901) and a scaffold sequence, and the spacer sequence is located at the 5′ end of the scaffold sequence (such as the sequences of SEQ ID NO: 903). In some embodiments, the sgRNA comprises a sequence having at least 70%, 71%, 72%, 73%, 74%, 75%, 76%, 77%, 78%, 79%, 80%, 81%, 82%, 83%, 84%, 85%, 86%, 87%, 88%, 89%, 90%, 91%, 92%, 93%, 94%, 95%, 96%, 97%, 98%, 99%, or 100% identity to SEQ ID NO: 903.

[0187] In some embodiments, the spacer sequence hybridizes to one or more nucleic acid in a prokaryotic cell or in a eukaryotic cell. In some embodiments, the eukaryotic cell is selected from the group consisting of: a plant cell, a fungal cell, a single cell eukaryotic organism, a mammalian cell, a reptile cell, an insect cell, an avian cell, a fish cell, a parasite cell, an arthropod cell, a cell of an invertebrate, a cell of a vertebrate, a rodent cell, a mouse cell, a rat cell, a primate cell, a non-human primate cell, and a human cell. In some embodiments, the eukaryotic cell comprises a mammalian cell. In some embodiments, the mammalian cell comprises a human cell. In some embodiments, the eukaryotic cell comprises a plant cell.

[0188] In some embodiments, the system further comprising a donor template nucleic acid.

[0189] As presented in this disclosure, the term “donor template nucleic acid” as used herein refers to a nucleic acid molecule that can be used by one or more cellular proteins to alter the structure of a target nucleic acid after a Cas protein described herein has altered a target nucleic acid. In some embodiments, the donor template nucleic acid is a double-stranded nucleic acid. In some embodiments, the donor template nucleic acid is a single-stranded nucleic acid. In some embodiments, the donor template nucleic acid is linear. In some embodiments, the donor template nucleic acid is circular (e.g., a plasmid). In some embodiments, the donor template nucleic acid is an exogenous nucleic acid molecule. In some embodiments, the donor template nucleic acid is an endogenous nucleic acid molecule (e.g., a chromosome). In some embodiments, the donor template nucleic acid is a DNA or an RNA or a DNA-RNA hybrid.

[0190] This invention also provides an engineered vector comprising the polynucleotide described in this disclosure.

[0191] As presented in this disclosure, a “vector” is a tool that allows or facilitates the transfer of an entity from one environment to another. It is a replicon, such as a plasmid, phage, or cosmid, into which another DNA segment may be inserted so as to bring about the replication of the inserted segment. Generally, a vector is capable of replication when associated with the proper control elements. In general, the term “vector” refers to a nucleic acid molecule capable of transporting another nucleic acid to which it has been linked. Vectors include, but are not limited to, nucleic acid molecules that are single-stranded, double-stranded, or partially double-stranded; nucleic acid molecules that comprise one or more free ends, no free ends (e.g., circular); nucleic acid molecules that comprise DNA, RNA, or both; and other varieties of polynucleotides known in the art. One type of vector is a “plasmid,” which refers to a circular double stranded DNA loop into which additional DNA segments can be inserted, such as by standard molecular cloning techniques. Another type of vector is a viral vector, wherein virally-derived DNA or RNA sequences are present in the vector for packaging into a virus (e.g., retroviruses, replication defective retroviruses, adenoviruses, replication defective adenoviruses, and adeno-associated viruses (AAVs)). Viral vectors also include polynucleotides carried by a virus for transfection into a host cell. Certain vectors are capable of autonomous replication in a host cell into which they are introduced (e.g., bacterial vectors having a bacterial origin of replication and episomal mammalian vectors). Other vectors (e.g., non-episomal mammalian vectors) are integrated into the genome of a host cell upon introduction into the host cell, and thereby are replicated along with the host genome. Moreover, certain vectors are capable of directing the expression of genes to which they are operatively-linked. Such vectors are referred to herein as “expression vectors”. Common expression vectors of utility in recombinant DNA techniques are often in the form of plasmids. Recombinant expression vectors can comprise a nucleic acid of the invention in a form suitable for expression of the nucleic acid in a host cell, which means that the recombinant expression vectors include one or more regulatory elements, which may be selected on the basis of the host cells to be used for expression, that is operatively-linked to the nucleic acid sequence to be expressed. Within a recombinant expression vector, “operably linked” is intended to mean that the nucleotide sequence of interest is linked to the regulatory element(s) in a manner that allows for expression of the nucleotide sequence (e.g., in an in vitro transcription/translation system or in a host cell when the vector is introduced into the host cell). In some embodiments, the vector is an expression vector. In some embodiments, the vector is an inducible, conditional, or constitutive expression vector. In some embodiments, the polynucleotide encoding the Cas protein and the polynucleotides encoding the guide RNA are on a same vector or on different vectors.

[0192] This invention also provides a vector system comprising one or more polynucleotides described in this disclosure and one or more polynucleotides encoding a guide RNA; wherein said guide RNA comprises a spacer sequence that is complementary to a target nucleic acid and a Cas protein binding segment that interacts with said Cas protein, wherein the Cas protein binding segment comprises a tracrRNA sequence and a direct repeat (DR) sequence that hybridizes to form a double-stranded RNA (dsRNA) duplex. In some embodiments, the polynucleotide encoding the Cas protein and the polynucleotides encoding the guide RNA are on a same vector or on different vectors.

[0193] This invention also provides an engineered, non-naturally occurring cell comprising: the Cas protein described in this disclosure, the polynucleotide described in this disclosure, the CRISPR-Cas system described in this disclosure, the vector described in this disclosure, or the vector system described in this disclosure.

[0194] This invention also provides a cell modified by utilizing the Cas protein described in this disclosure, the polynucleotide described in this disclosure, the CRISPR-Cas system described in this disclosure, the vector described in this disclosure, or the vector system described in this disclosure.

[0195] In some embodiments, the cell is a eukaryotic cell or a prokaryotic cell. In some embodiments, the eukaryotic cell is selected from the group consisting of a plant cell, a fungal cell, a single cell eukaryotic organism, a mammalian cell, a reptile cell, an insect cell, an avian cell, a fish cell, a parasite cell, an arthropod cell, a cell of an invertebrate, a cell of a vertebrate, a rodent cell, a mouse cell, a rat cell, a primate cell, a non-human primate cell, and a human cell. In some embodiments, the cell is a mammalian cell or a human cell or a plant cell.

[0196] In some embodiments, the cell is a vertebrate, mammalian, rodent, goat, pig, bird, chicken, turkey, cow, horse, sheep, fish, primate, or human cell. In some embodiments, the cell is a mammalian cell. In one embodiment, the cell is a human cell. In some embodiments, the cell is a somatic cell, a germ cell, or a prenatal cell. In some embodiments, the cell is a zygotic cell, a blastocyst cell, an embryonic cell, a stem cell, a mitotically competent cell, or a meiotically competent cell. In some embodiments, the cell is not part of a human embryo. In some embodiments, the cell is a somatic cell. In one embodiment, the cell is a T cell, a CD8+ T cell, a CD8+ naive T cell, a central memory T cell, an effector memory T cell, a CD4+ T cell, a stem cell memory T cell, a helper T cell, a regulatory T cell, a cytotoxic T cell, a natural killer T cell, a Hematopoietic Stem Cell, a long term hematopoietic stem cell, a short term hematopoietic stem cell, a multipotent progenitor cell, a lineage restricted progenitor cell, a lymphoid progenitor cell, a myeloid progenitor cell, a common myeloid progenitor cell, an erythroid progenitor cell, a megakaryocyte erythroid progenitor cell, a retinal cell, a photoreceptor cell, a rod cell, a cone cell, a retinal pigmented epithelium cell, a trabecular meshwork cell, a cochlear hair cell, an outer hair cell, an inner hair cell, a pulmonary epithelial cell, a bronchial epithelial cell, an alveolar epithelial cell, a pulmonary epithelial progenitor cell, a striated muscle cell, a cardiac muscle cell, a muscle satellite cell, a neuron, a neuronal stem cell, a mesenchymal stem cell, an induced pluripotent stem (iPS) cell, an embryonic stem cell, a monocyte, a megakaryocyte, a neutrophil, an eosinophil, a basophil, a mast cell, a reticulocyte, a B cell, e.g., a progenitor B cell, a Pre B cell, a Pro B cell, a memory B cell, a plasma B cell, a gastrointestinal epithelial cell, a biliary epithelial cell, a pancreatic ductal epithelial cell, an intestinal stem cell, a hepatocyte, a liver stellate cell, a Kupffer cell, an osteoblast, an osteoclast, an adipocyte, a preadipocyte, a pancreatic islet cell (e.g., a beta cell, an alpha cell, a delta cell), a pancreatic exocrine cell, a Schwann cell, or an oligodendrocyte. In some embodiments, the cell is a T cell, a Hematopoietic Stem Cell, a retinal cell, a cochlear hair cell, a pulmonary epithelial cell, a muscle cell, a neuron, a mesenchymal stem cell, an induced pluripotent stem (iPS) cell, or an embryonic stem cell. In another embodiment, the cell is a plant cell.

[0197] In some embodiments, the disclosure provides an isolated eukaryotic cell comprising a modified target locus of interest, wherein the target locus of interest has been modified according to a method or using of a composition or using of a system described in this invention.

[0198] In some embodiments, the cell is a eukaryotic cell or a prokaryotic cell. In some embodiments, the eukaryotic cell is selected from the group consisting of: a plant cell, a fungal cell, a single cell eukaryotic organism, a mammalian cell, a reptile cell, an insect cell, an avian cell, a fish cell, a parasite cell, an arthropod cell, a cell of an invertebrate, a cell of a vertebrate, a rodent cell, a mouse cell, a rat cell, a primate cell, a non-human primate cell, and a human cell. In some embodiments, the cell is a mammalian cell or a human cell or a plant cell.

[0199] In some embodiments, the cell is a vertebrate, mammalian, rodent, goat, pig, bird, chicken, turkey, cow, horse, sheep, fish, primate, or human cell. In some embodiments, the cell is a mammalian cell. In one embodiment, the cell is a human cell. In some embodiments, the cell is a somatic cell, a germ cell, or a prenatal cell. In some embodiments, the cell is a zygotic cell, a blastocyst cell, an embryonic cell, a stem cell, a mitotically competent cell, or a meiotically competent cell. In some embodiments, the cell is not part of a human embryo. In some embodiments, the cell is a somatic cell. In one embodiment, the cell is a T cell, a CD8+ T cell, a CD8+ naive T cell, a central memory T cell, an effector memory T cell, a CD4+ T cell, a stem cell memory T cell, a helper T cell, a regulatory T cell, a cytotoxic T cell, a natural killer T cell, a Hematopoietic Stem Cell, a long term hematopoietic stem cell, a short term hematopoietic stem cell, a multipotent progenitor cell, a lineage restricted progenitor cell, a lymphoid progenitor cell, a myeloid progenitor cell, a common myeloid progenitor cell, an erythroid progenitor cell, a megakaryocyte erythroid progenitor cell, a retinal cell, a photoreceptor cell, a rod cell, a cone cell, a retinal pigmented epithelium cell, a trabecular meshwork cell, a cochlear hair cell, an outer hair cell, an inner hair cell, a pulmonary epithelial cell, a bronchial epithelial cell, an alveolar epithelial cell, a pulmonary epithelial progenitor cell, a striated muscle cell, a cardiac muscle cell, a muscle satellite cell, a neuron, a neuronal stem cell, a mesenchymal stem cell, an induced pluripotent stem (iPS) cell, an embryonic stem cell, a monocyte, a megakaryocyte, a neutrophil, an eosinophil, a basophil, a mast cell, a reticulocyte, a B cell, e.g., a progenitor B cell, a Pre B cell, a Pro B cell, a memory B cell, a plasma B cell, a gastrointestinal epithelial cell, a biliary epithelial cell, a pancreatic ductal epithelial cell, an intestinal stem cell, a hepatocyte, a liver stellate cell, a Kupffer cell, an osteoblast, an osteoclast, an adipocyte, a preadipocyte, a pancreatic islet cell (e.g., a beta cell, an alpha cell, a delta cell), a pancreatic exocrine cell, a Schwann cell, or an oligodendrocyte. In some embodiments, the cell is a T cell, a Hematopoietic Stem Cell, a retinal cell, a cochlear hair cell, a pulmonary epithelial cell, a muscle cell, a neuron, a mesenchymal stem cell, an induced pluripotent stem (iPS) cell, or an embryonic stem cell. In another embodiment, the cell is a plant cell.

[0200] In some embodiments, the vectors, e.g., plasmids or viral vectors, are delivered to the tissue of interest by, e.g., intramuscular injection, intravenous administration, transdermal administration, intranasal administration, oral administration, or mucosal administration. Such delivery may be either via a single dose or multiple doses. One skilled in the art understands that the actual dosage to be delivered herein may vary greatly depending upon a variety of factors, such as the vector choices, the target cells, organisms, tissues, the general conditions of the subject to be treated, the degrees of transformation/modification sought, the administration routes, the administration modes, the types of transformation/modification sought, etc.

[0201] In certain embodiments, the delivery is via adeno-associated viruses (AAV), e.g., AAV2, AAV8, or AAV9, which can be administered in a single dose containing at least 1×10⁵ particles (also referred to as particle units, pu) of adenoviruses or adeno-associated viruses. In some embodiments, the dose is at least about 1×10⁶ particles, at least about 1×10⁷ particles, at least about 1×10⁸ particles, or at least about 1×10⁹ particles of the adeno-associated viruses. Due to the limited genomic payload of recombinant AAV, the smaller size of the type II Cas nuclease described herein enables greater versatility in packaging the effector and RNA guides with the appropriate control sequences (e.g., promoters) required for efficient and cell-type specific expression.

[0202] In some embodiments, the delivery is via a recombinant adeno-associated virus (rAAV) vector. For example, in some embodiments, a modified AAV vector may be used for delivery. Modified AAV vectors can be based on one or more of several capsid types, including AAV1, AAV2, AAV5, AAV6, AAV8, AAV8.2. AAV9, AAV rh1O, modified AAV vectors (e.g., modified AAV2, modified AAV3, modified AAV6) and pseudotyped AAV (e.g., AAV2/8, AAV2/5 and AAV2/6).

[0203] In some embodiments, the delivery is via plasmids. The dosage can be a sufficient number of plasmids to elicit a response. In some embodiments, suitable quantities of plasmid DNA in plasmid compositions can be from about 0.1 to about 2 mg. Plasmids will generally include (i) a promoter; (ii) a sequence encoding a nucleic acid-targeting CRISPR enzymes, operably linked to the promoter; (iii) a selectable marker; (iv) an origin of replication; and (v) a transcription terminator downstream of and operably linked to (ii). The plasmids can also encode the RNA components of a CRISPR-Cas system, but one or more of these may instead be encoded on different vectors. The frequency of administration is within the ambit of the medical or veterinary practitioner (e.g., physician, veterinarian), or a person skilled in the art.

[0204] This invention also provides a kit comprising: the Cas protein described in this disclosure, the polynucleotide described in this disclosure, the CRISPR-Cas system described in this disclosure, the vector described in this disclosure, the vector system described in this disclosure, or the cell described in this disclosure.

[0205] The kits described in this disclosure may encompass one or more containers with components essential for performing the methods in this disclosure, and may optionally contain instructions for use. Any of the kits delineated may additionally comprise ancillary components required for the execution of the editing methods. Each component within the kits, where applicable, may be provided in a liquid form (e.g., dissolved in solution) or in a solid form (e.g., lyophilized powder). In specific embodiments, some components may be reconstituted or otherwise processed (e.g., to an active state) upon the addition of a suitable solvent or other substance (such as water or buffer), which may or may not be furnished with the kit. In some embodiments, the kit may further comprise other suitable excipients such as buffers or reagents for facilitating the application of the kit. Preferably, the kit may be applied in various applications such as medical applications including therapies and diagnosis, researches and the like. Accordingly, the type II Cas nuclease and the kit of the present invention may be used in the preparation of a medicament for treatment and/or in the preparation of an agent for research study.

[0206] The Cas protein, CRISPR-Cas system, polynucleotide described herein, can be delivered by various delivery systems such as vectors, e.g., plasmids, viral delivery vectors, such as adeno-associated viruses (AAV), lentiviruses, adenoviruses, and other viral vectors, or methods, such as nucleofection or electroporation of ribonucleoprotein complexes consisting of Type V-I effectors and their cognate RNA guide or guides. The proteins and one or more RNA guides can be packaged into one or more vectors, e.g., plasmids or viral vectors. For bacterial applications, the nucleic acids encoding any of the components of the CRISPR systems described herein can be delivered to the bacteria using a phage. Exemplary phages, include, but are not limited to, T4 phage, Mu, λ phage, T5 phage, T7 phage, T3 phage, Φ29, M13, MS2, Qβ, and Φ174.

[0207] This invention also provides a pharmaceutical composition comprising: the Cas protein described in this disclosure, the polynucleotide described in this disclosure, the CRISPR-Cas system described in this disclosure, the vector described in this disclosure, the vector system described in this disclosure or the cell described in this disclosure.

[0208] As presented in this disclosure, the term “pharmaceutical composition” refers to a formulation intended for pharmaceutical use. In certain embodiments, the pharmaceutical composition further comprises a pharmaceutically acceptable excipient. In some embodiments, the pharmaceutical composition may include additional therapeutic agents. In some embodiments, the pharmaceutical composition is prepared following standard procedures for administration via intravenous, intramuscular, intradermal, intra-articular, intralesional, intraperitoneal, intracardiac, intrathecal, intracerebroventrical, epidural, topical, subconjunctival, intrastromal, peribulbar, intravitreal, posterior juxlascleral, transscleral, suprachoroidal, retrobulbar, subretinal, sub-tenon, nasal inhalational, pressurized inhalation, oral, subcutaneous or local routes to a subject, such as a human patient. For instance, compositions for injection may be provided as sterile isotonic aqueous solutions. If necessary, the pharmaceutical composition may also contain solubilizing agents and local anesthetics, such as lidocaine, to minimize injection site discomfort. Typically, components are supplied either separately or in admixture as a unit dose, e.g., as a lyophilized powder or a concentrated solution devoid of water, in a hermetically sealed container that indicates the quantity of the active agent(s). Where the pharmaceutical composition is intended for infusion, it may be combined with an infusion bottle containing sterile pharmaceutical-grade water or saline. Where the pharmaceutical composition is for injection, sterile water for injection or saline may be included to allow for component mixing prior to administration. Additionally, wetting agents, coloring agents, release agents, coating agents, sweetening agents, flavoring agents, perfuming agents, preservatives, and antioxidants may also be incorporated into the formulation as needed.

[0209] In some embodiments, the pharmaceutical composition further comprises a delivery system selected from: AAV (adeno-associated viruses), Adenoviruses, retroviruses, HSV (herpes simplex virus), Gammaretrovirus, LV (lentivirus), eCIS (extracellular Contractile Injection System), eVLPs (Engineered virus-like particles), VLPs (virus-like particles), liposomes, plasmid, LNPs (lipid nanoparticles), exosomes, microvesicles, nucleic acid nanoassemblies, a gene gun, and/or an implantable device.

[0210] This invention also provides the use of the Cas protein, polynucleotide, CRISPR-Cas system, vector, vector system, cell, kit, or pharmaceutical composition described in this disclosure for the treatment, prevention, diagnosis, or detection of a disease.

[0211] This invention also provides a method of modifying or targeting a target DNA locus, wherein the method comprising delivering to said locus: the Cas protein described in this disclosure; the polynucleotide described in this disclosure; the CRISPR-Cas system described in this disclosure; the vector described in this disclosure, the vector system described in this disclosure the kit described in this disclosure or the pharmaceutical composition described in this disclosure.

[0212] In some embodiments, the disclosure also provides a method of targeting and cleaving a target DNA, the method comprising: contacting the target DNA with the Cas protein described in this disclosure; the polynucleotide described in this disclosure; the CRISPR-Cas system described in this disclosure; the vector described in this disclosure, the vector system described in this disclosure the kit described in this disclosure or the pharmaceutical composition described in this disclosure.

[0213] In some embodiments, said modifying or targeting a target locus comprises inducing a DNA strand break. In some embodiments, said modifying or targeting a target locus comprises inducing a DNA double strand break or a DNA single strand break. In some embodiments, said modifying or targeting a target locus comprises altering gene expression of one or more genes. In some embodiments, said modifying or targeting a target locus comprises epigenetic modification of said target DNA locus. In some embodiments, the method is a method of modifying a cell, a cell line, or an organism by manipulation of one or more target sequences at genomic loci of interest.

[0214] In some embodiments, cleaving the target DNA or target sequence results in the formation of an indel or the insertion of a nucleotide sequence. In some embodiments, cleaving the target DNA or target nucleotide comprising cleaving the target DNA or target sequence in two sites, and results in the deletion or inversion of a sequence between the two sites. In some embodiments, the target DNA is a double stranded DNA or a single stranded DNA, or DNA-RNA hybrids.

[0215] In some embodiments, said modifying or targeting a target locus comprises inducing a DNA strand break, altering gene expression of one or more genes, or epigenetic modification of said target DNA locus; optionally, the DNA strand break comprise a DNA double strand break or a DNA single strand break.

[0216] In some embodiments, the method is performed in vitro or in vivo.

[0217] This invention also provides an isolated eukaryotic cell comprising a modified target locus of interest, wherein the target locus of interest has been modified according to the method described in this disclosure, or by using the system described in this disclosure, or by using the Cas protein described in this disclosure; or by using the polynucleotide described in this disclosure; or by using the CRISPR-Cas system described in this disclosure; or by using the vector described in this disclosure, or by using the vector system described in this disclosure the, or by using the kit described in this disclosure, or by using the pharmaceutical composition described in this disclosure.

[0218] This invention also provides a system for detecting the presence of a nucleic acid target sequence in an in vitro sample, comprising: a) a Cas protein described in this disclosure; b) at least one guide polynucleotide comprising a guide sequence capable of binding the target sequence, and designed to form a complex with the Cas protein; and c) a nucleic acid-based masking construct comprising a non-target sequence; wherein the Cas protein exhibits collateral cleavage activity of RNA and/or ssDNA and cleaves the non-target sequence of the nucleic acid-based masking construct activated by the target sequence.

[0219] This invention also provides a method for detecting target nucleic acids in samples comprising: contacting one or more samples with a) a Cas protein described in this disclosure; b) at least one guide polynucleotide comprising a guide sequence designed to have a degree of complementarity with the target sequence, and designed to form a complex with the Cas protein; and c) a nucleic acid-based masking construct comprising a non-target sequence; wherein the Cas protein exhibits collateral cleavage activity of RNA and/or ssDNA and cleaves the non-target sequence of the nucleic acid-based masking construct activated by the target sequences; and detecting a signal from cleavage of the non-target sequence, thereby detecting the one or more target sequences in the sample.

[0220] As present in this disclosure, a “sample” may contain whole cells and/or live cells and/or cell debris. The sample may contain (or be derived from) a “bodily fluid”. The present disclosure encompasses embodiments wherein the bodily fluid is selected from amniotic fluid, aqueous humour, vitreous humour, bile, blood serum, breast milk, cerebrospinal fluid, cerumen (earwax), chyle, chyme, endolymph, perilymph, exudates, feces, female ejaculate, gastric acid, gastric juice, lymph, mucus (including nasal drainage and phlegm), pericardial fluid, peritoneal fluid, pleural fluid, pus, rheum, saliva, sebum (skin oil), semen, sputum, synovial fluid, sweat, tears, urine, vaginal secretion, vomit and mixtures of one or more thereof. Samples include cell cultures, bodily fluids, cell cultures from bodily fluids. Bodily fluids may be obtained from a mammal organism, for example by puncture, or other collecting or sampling procedures.

[0221] This invention also provides a guide RNA (gRNA) comprising: a) a spacer sequence of SEQ ID NO: 901; b) a spacer sequence having at least 15, 16, 17, 18, 19, or 20 contiguous nucleotides of the sequence of SEQ ID NO: 901; c) a spacer sequence with at least 99%, 98%, 97%, 96%, 95%, 94%, 93%, 92%, 91%, or 90% identity to the sequence of SEQ ID NO: 901. In some embodiments, the gRNA further comprises a Cas protein binding segment; and wherein the Cas protein binding segment comprises a tracrRNA sequence and a direct repeat (DR) sequence that hybridizes to form a double-stranded RNA (dsRNA) duplex. In some embodiments, the gRNA is a dual guide RNA. In some embodiments, the gRNA is a single guide RNA. In some embodiments, the gRNA is modified. In some embodiments, at least three nucleotides of the gRNA are modified. In some embodiment, the gRNA comprises a 5′ end modification comprising at least two phosphorothioate (PS) linkages within the first seven nucleotides at the 5′ end of the 5′ terminus. In some embodiments, the gRNA comprises a 3′ end modification comprising at least two phosphorothioate (PS) linkages within the first seven nucleotides at the 3′ end of the 3′ terminus. In some embodiments, the gRNA has a sequence identity of at least 70%, 71%, 72%, 73%, 74%, 75%, 76%, 77%, 78%, 79%, 80%, 81%, 82%, 83%, 84%, 85%, 86%, 87%, 88%, 89%, 90%, 91%, 92%, 93%, 94%, 95%, 96%, 97%, 98%, 99%, or 100% to the nucleotide sequence of SEQ ID NO: 903.

[0222] This invention also provides polynucleotide encoding the gRNA described herein; wherein the guide RNA (gRNA) comprising: a) a spacer sequence of SEQ ID NO: 901; b) a spacer sequence having at least 15, 16, 17, 18, 19, or 20 contiguous nucleotides of the sequence of SEQ ID NO: 901; c) a spacer sequence with at least 99%, 98%, 97%, 96%, 95%, 94%, 93%, 92%, 91%, or 90% identity to the sequence of SEQ ID NO: 901. In some embodiments, the gRNA comprises a sequence having at least 70%, 71%, 72%, 73%, 74%, 75%, 76%, 77%, 78%, 79%, 80%, 81%, 82%, 83%, 84%, 85%, 86%, 87%, 88%, 89%, 90%, 91%, 92%, 93%, 94%, 95%, 96%, 97%, 98%, 99%, or 100% identity to SEQ ID NO: 903.

[0223] An engineered, non-naturally occurring CRISPR-Cas system comprising: a) a Cas protein or a polynucleotide encoding the Cas protein thereof, b) at least one guide RNA (gRNA) described in this disclosure or at least one engineered nucleic acid encoding the guide RNA thereof, wherein said gRNA further comprises a Cas protein binding segment that interacts with said Cas protein; and wherein the Cas protein binding segment comprises a tracrRNA sequence and a direct repeat (DR) sequence that hybridizes to form a double-stranded RNA (dsRNA) duplex; wherein the guide RNA (gRNA) comprising: a) a spacer sequence of SEQ ID NO: 901; b) a spacer sequence having at least 15, 16, 17, 18, 19, or 20 contiguous nucleotides of the sequence of SEQ ID NO: 901; c) a spacer sequence with at least 99%, 98%, 97%, 96%, 95%, 94%, 93%, 92%, 91%, or 90% identity to the sequence of SEQ ID NO: 901. In some embodiments, the gRNA comprises: a) a sequence of SEQ ID NO: 903; or b) a sequence having at least 70%, 71%, 72%, 73%, 74%, 75%, 76%, 77%, 78%, 79%, 80%, 81%, 82%, 83%, 84%, 85%, 86%, 87%, 88%, 89%, 90%, 91%, 92%, 93%, 94%, 95%, 96%, 97%, 98%, 99%, or 100% identity to SEQ ID NO: 903.

[0224] In some embodiments, the Cas protein comprises a sequence having at least 70%, 71%, 72%, 73%, 74%, 75%, 76%, 77%, 78%, 79%, 80%, 81%, 82%, 83%, 84%, 85%, 86%, 87%, 88%, 89%, 90%, 91%, 92%, 93%, 94%, 95%, 96%, 97%, 98%, 99%, or 100% identity to SEQ ID NO: 12; or the Cas protein comprises a sequence having at least 70%, 71%, 72%, 73%, 74%, 75%, 76%, 77%, 78%, 79%, 80%, 81%, 82%, 83%, 84%, 85%, 86%, 87%, 88%, 89%, 90%, 91%, 92%, 93%, 94%, 95%, 96%, 97%, 98%, 99%, or 100% identity to SEQ ID NO: 12, with the exception of the amino acid “M” at position 1 of the sequence.

[0225] In some embodiments, the Cas protein further comprises an effector domain (or functional domain). Such effector domains can have one or more types of enzymatic activities, including polymerase activity, ligase activity, reverse transcriptase activity, deaminase activity, replication activity, or proofreading activity. In some embodiment, the effector domains domain comprises a nuclease, a nickase, a deaminase, a reverse transcriptase, a recombinase, a methyltransferase, a methylase, an acetylase, an acetyltransferase, a transcriptional activator, a transcriptional repressor domain, a cryptochrome, a light inducible/controllable domain, or a chemically inducible/controllable domain.

[0226] In some embodiments, the Cas protein further comprises one or more of a nuclear localization signal sequence, a nuclear export signal sequence, a cell penetrating peptide sequence, an affinity tag. the type II Cas protein comprises one or more nuclear localization signal(s) NLS(s). The NLS(s) can locate at the end or other portion of the peptide. The NLS(s) located each end or other portion of the Cas9 amino acid sequence can be same or not. In some embodiments, the NLS of the N-terminal end and the NLS of the C-terminal end are the same. In some embodiments, the NLS of the N-terminal end and the NLS of the C-terminal end are different. In some embodiments, the N-terminal end of the Cas9 amino acid sequence comprising one NLS and the C-terminal end of the Cas9 amino acid sequence comprising one NLS. The amino acid sequence of NLS fused to the N-terminal end and/or the C-terminal end of the Cas9 amino acid sequence respectively. NLS maybe an SV40 (simian virus 40) NLS, c-Myc NLS, or other suitable monopartite NLS. The NLS may be fused to an N-terminal and/or a C-terminal of the Cas protein. In some embodiments, an affinity tag (such as GST, FLAG or hexahistidine sequences) is utilized for purification of the Cas protein by affinity chromatography. In some embodiments, the amino acid sequence of C-terminal NLS is set forth in SEQ ID NO: 881 or 882. In some embodiments, the amino acid sequence of the C-terminal FLAG sequence is set forth in SEQ ID NO: 883. Other available sequences and different combinations can also be chosen for the NLSs sequences and FLAG sequence.

[0227] In some embodiments, the Cas protein, the Cas protein comprises an amino acid sequence having at least 70%, 71%, 72%, 73%, 74%, 75%, 76%, 77%, 78%, 79%, 80%, 81%, 82%, 83%, 84%, 85%, 86%, 87%, 88%, 89%, 90%, 91%, 92%, 93%, 94%, 95%, 96%, 97%, 98%, 99%, or 100% sequence identity to the amino acid sequence of SEQ ID NO: 12.

[0228] In some embodiments, the Cas protein has a sequence identity of at least 70%, 71%, 72%, 73%, 74%, 75%, 76%, 77%, 78%, 79%, 80%, 81%, 82%, 83%, 84%, 85%, 86%, 87%, 88%, 89%, 90%, 91%, 92%, 93%, 94%, 95%, 96%, 97%, 98%, 99%, or 100% to the amino acid sequence of SEQ ID NO: 12, and is capable of recognizing a protospacer adjacent motif (PAM) having a sequence of: NRHACT.

[0229] In some embodiments, the Cas protein is a nickase or dead Cas protein. The DNA cleavage domain of an active Cas protein in this invention include two subdomains, the HNH nuclease subdomain and the RuvC subdomain. Mutations within these subdomains can silence the nuclease activity of the Cas protein. In some embodiments, Cas protein has a sequence identity of at least 70%, 71%, 72%, 73%, 74%, 75%, 76%, 77%, 78%, 79%, 80%, 81%, 82%, 83%, 84%, 85%, 86%, 87%, 88%, 89%, 90%, 91%, 92%, 93%, 94%, 95%, 96%, 97%, 98%, 99%, or 100% to the amino acid sequence of SEQ ID NO: 12, and includes a mutation at residue D10 or H862. In some embodiments, the Cas protein has a sequence identity of at least 70%, 71%, 72%, 73%, 74%, 75%, 76%, 77%, 78%, 79%, 80%, 81%, 82%, 83%, 84%, 85%, 86%, 87%, 88%, 89%, 90%, 91%, 92%, 93%, 94%, 95%, 96%, 97%, 98%, 99%, or 100% to the amino acid sequence of SEQ ID NO: 12, and includes a mutation at residue D10 or H862, with the exception of the amino acid “M” at position 1 of the sequence.

[0230] In some embodiments, the mutation at residue D10 or H862 of SEQ ID NO: 12 is D10A or H862A. In some embodiments, the Cas protein has a sequence identity of at least 70%, 71%, 72%, 73%, 74%, 75%, 76%, 77%, 78%, 79%, 80%, 81%, 82%, 83%, 84%, 85%, 86%, 87%, 88%, 89%, 90%, 91%, 92%, 93%, 94%, 95%, 96%, 97%, 98%, 99%, or 100% to the amino acid sequence of any one of SEQ ID NOs: 872-874.

[0231] This invention also provides an engineered vector comprising the polynucleotide encoding the gRNA described in this disclosure; wherein the guide RNA (gRNA) comprising: a) a spacer sequence of SEQ ID NO: 901; b) a spacer sequence having at least 15, 16, 17, 18, 19, or 20 contiguous nucleotides of the sequence of SEQ ID NO: 901; c) a spacer sequence with at least 99%, 98%, 97%, 96%, 95%, 94%, 93%, 92%, 91%, or 90% identity to the sequence of SEQ ID NO: 901. In some embodiments, the gRNA comprises: a) a sequence of SEQ ID NO: 903; or b) a sequence having at least 70%, 71%, 72%, 73%, 74%, 75%, 76%, 77%, 78%, 79%, 80%, 81%, 82%, 83%, 84%, 85%, 86%, 87%, 88%, 89%, 90%, 91%, 92%, 93%, 94%, 95%, 96%, 97%, 98%, 99%, or 100% identity to SEQ ID NO: 903.

[0232] In some embodiments, said vector is optionally an inducible, conditional, or constitutive expression vector.

[0233] This invention also provides a vector system comprising one or more polynucleotide encoding the gRNA described in this disclosure; wherein the guide RNA (gRNA) comprising: a) a spacer sequence of SEQ ID NO: 901; b) a spacer sequence having at least 15, 16, 17, 18, 19, or 20 contiguous nucleotides of the sequence of SEQ ID NO: 901; c) a spacer sequence with at least 99%, 98%, 97%, 96%, 95%, 94%, 93%, 92%, 91%, or 90% identity to the sequence of SEQ ID NO: 871. In some embodiments, the gRNA comprises: a) a sequence of SEQ ID NO: 903; or b) a sequence having at least 70%, 71%, 72%, 73%, 74%, 75%, 76%, 77%, 78%, 79%, 80%, 81%, 82%, 83%, 84%, 85%, 86%, 87%, 88%, 89%, 90%, 91%, 92%, 93%, 94%, 95%, 96%, 97%, 98%, 99%, or 100% identity to SEQ ID NO: 903.

[0234] This invention also provides a pharmaceutical composition comprising the gRNA described in this disclosure; the polynucleotide encoding such gRNA, the CRISPR-Cas system comprising such gRNA or polynucleotide, the vector comprising such gRNA encoding sequence, the vector system such gRNA encoding sequence; wherein the guide RNA (gRNA) comprising: a) a spacer sequence of SEQ ID NO: 901; b) a spacer sequence having at least 15, 16, 17, 18, 19, or 20 contiguous nucleotides of the sequence of SEQ ID NO: 901; c) a spacer sequence with at least 99%, 98%, 97%, 96%, 95%, 94%, 93%, 92%, 91%, or 90% identity to the sequence of SEQ ID NO: 901, In some embodiments, the gRNA comprises: a) a sequence of SEQ ID NO: 903; or b) a sequence having at least 770%, 71%, 72%, 73%, 74%, 75%, 76%, 77%, 78%, 79%, 80%, 81%, 82%, 83%, 84%, 85%, 86%, 87%, 88%, 89%, 90%, 91%, 92%, 93%, 94%, 95%, 96%, 97%, 98%, 99%, or 100% identity to SEQ ID NO: 903.

[0235] This invention also provide a method for treating, preventing, or diagnosing diseases associated with the RHO gene locus in a subject, comprising contacting the target cell with the gRNA described in this disclosure; b) contacting the target cell with the polynucleotide encoding such gRNA; c) contacting the target cell with the CRISPR-Cas system comprising such gRNA or polynucleotide; or d) contacting the target cell with the pharmaceutical described in this disclosure; wherein the guide RNA (gRNA) comprising: a) a spacer sequence of SEQ ID NO: 901; b) a spacer sequence having at least 15, 16, 17, 18, 19, or 20 contiguous nucleotides of the sequence of SEQ ID NO: 901; c) a spacer sequence with at least 99%, 98%, 97%, 96%, 95%, 94%, 93%, 92%, 91%, or 90% identity to the sequence of SEQ ID NO: 901. In some embodiments, the gRNA comprises: a) a sequence of SEQ ID NO: 903; or b) a sequence having at least 70%, 71%, 72%, 73%, 74%, 75%, 76%, 77%, 78%, 79%, 80%, 81%, 82%, 83%, 84%, 85%, 86%, 87%, 88%, 89%, 90%, 91%, 92%, 93%, 94%, 95%, 96%, 97%, 98%, 99%, or 100% identity to SEQ ID NO: 903.

[0236] As presented in this disclosure, diseases associated with the “RHO gene locus” refer to a group of disorders characterized by mutations in the RHO gene. The RHO gene encodes the rhodopsin protein, which is essential for photoreceptor function in the retina. Mutations in this gene can lead to various retinal degenerative diseases, primarily affecting rod photoreceptors, and can result in vision loss or blindness. These disorders typically manifest as inherited retinal dystrophies, such as retinitis pigmentosa, which is characterized by progressive vision loss due to the degeneration of photoreceptor cells, particularly rods. Patients with mutations in the RHO gene may experience night blindness and a gradual loss of peripheral vision, and these conditions are often inherited in an autosomal dominant manner.

[0237] This invention also provides a method of treating, preventing or diagnosing diseases associated with gene locus in a subject, comprising administering a) the gRNA described in this disclosure; b) administering the target cell with the polynucleotide encoding such gRNA; c) administering the target cell with the CRISPR-Cas system comprising such gRNA or polynucleotide; or d) administering the target cell with the pharmaceutical described in this disclosure; wherein the guide RNA (gRNA) comprising: i) a spacer sequence of SEQ ID NO: 901. ii) a spacer sequence having at least 15, 16, 17, 18, 19, or 20 contiguous nucleotides of the sequence of SEQ ID NO: 901; or iii) a spacer sequence with at least 99%, 98%, 97%, 96%, 95%, 94%, 93%, 92%, 91%, or 90% identity to the sequence of SEQ ID NO: 901. In some embodiments, the gRNA comprises: a sequence of SEQ ID NO: 903; or a sequence having at least 70%, 71%, 72%, 73%, 74%, 75%, 76%, 77%, 78%, 79%, 80%, 81%, 82%, 83%, 84%, 85%, 86%, 87%, 88%, 89%, 90%, 91%, 92%, 93%, 94%, 95%, 96%, 97%, 98%, 99%, or 100% identity to SEQ ID NO: 903.

[0238] This invention also provides a composition comprising: (i) an RNA-guided DNA binding agent, wherein:
[0239] a. the RNA-guided DNA binding agent comprises a sequence with at least 90% identity to SEQ ID NO: 12 or 92; and/or
[0240] b. the RNA-guided DNA binding agent comprises a sequence with at least 95%, 96%, 97%, 98%, 99%, 100% identity to SEQ ID NO: 12 or 92; and/or
   (ii) a sgRNA or a vector encoding a sgRNA, wherein the sgRNA comprises a sgRNA sequence of SEQ ID NO: 903.

[0241] This invention also provides a method of modifying the RHO gene locus, comprising delivering a composition to a cell, wherein the composition comprises:
[0242] a. a guide RNA comprising a guide sequence of SEQ ID NO: 901;
[0243] b. a guide RNA comprising at least 17, 18, 19 or 20 contiguous nucleotides of a sequence of SEQ ID NO: 901; or
[0244] c. a guide RNA comprising a guide sequence that with at least 99%, 98%, 97%, 96%, 95%, 94%, 93%, 92%, 91%, or 90% identity to a sequence of SEQ ID NO: 901.

[0245] This invention also provides a method of treating, preventing or diagnosing diseases associated with RHO in a subject, comprising administering a composition to a subject in need thereof, wherein the composition comprises:
[0246] a. a guide RNA comprising a guide sequence of SEQ ID NO: 901;
[0247] b. a guide RNA comprising at least 17, 18, 19 or 20 contiguous nucleotides of a sequence of SEQ ID NO: 901; or
[0248] c. a guide RNA comprising a guide sequence that with at least 99%, 98%, 97%, 96%, 95%, 94%, 93%, 92%, 91%, or 90% identity to a sequence of SEQ ID NO: 901.

[0249] This invention also provides a method of modifying the RHO gene locus, comprising delivering a composition to a cell, wherein the composition comprises:
[0250] a. a sgRNA comprising a sgRNA sequence of SEQ ID NO: 903;
[0251] b. a sgRNA comprising a sgRNA sequence with at least 90% identity to a sequence of SEQ ID NO: 903; or
[0252] c. a sgRNA comprising a sgRNA sequence with at least 99%, 98%, 97%, 96%, 95%, 94%, 93%, 92%, 91%, or 90% identity to a sequence of SEQ ID NO: 903.

[0253] This invention also provides a method of treating, preventing or diagnosing diseases associated with RHO in a subject, comprising administering a composition to a subject in need thereof, wherein the composition comprises:
[0254] a. a sgRNA comprising a sgRNA sequence of SEQ ID NO: 903;
[0255] b. a sgRNA comprising a sgRNA sequence with at least 90% identity to a sequence of SEQ ID NO: 903; or
[0256] c. a sgRNA comprising a sgRNA sequence with at least 99%, 98%, 97%, 96%, 95%, 94%, 93%, 92%, 91%, or 90% identity to a sequence of SEQ ID NO: 903.

[0257] This invention also provides a method of treating, preventing or diagnosing diseases associated with RHO in a subject, comprising administering a composition to a subject in need thereof, wherein the composition comprises:
[0258] a. a guide RNA comprising a spacer sequence of SEQ ID NO: 901;
[0259] b. a guide RNA comprising at least 17, 18, 19 or 20 contiguous nucleotides of a sequence of SEQ ID NO: 901; or
[0260] c. a guide RNA comprising a guide sequence that with at least 99%, 98%, 97%, 96%, 95%, 94%, 93%, 92%, 91%, or 90% identity to a sequence of SEQ ID NO: 901.

[0261] This invention also provides a method of modifying the RHO gene locus, comprising delivering a composition to a cell, wherein the composition comprises:
[0262] (i) a Cas protein, wherein:
   [0263] a. the Cas protein comprises a sequence with at least 90% identity to SEQ ID NO: 12 or 92; and/or
   [0264] b. the RNA-guided DNA binding agent comprises a sequence with at least 95%, 96%, 97%, 98%, 99%, 100% identity to SEQ ID NO: 12 or 92; and/or
[0265] (ii) a guide RNA or a vector encoding a guide RNA, wherein the guide RNA comprises a spacer sequence of SEQ ID NO: 901.

[0266] This invention also provides a method of treating, preventing or diagnosing diseases associated with RHO in a subject, comprising administering a composition to a subject in need thereof, wherein the composition comprises:
[0267] (i) an RNA-guided DNA binding agent, wherein:
   [0268] a. the RNA-guided DNA binding agent comprises a sequence with at least 90% identity to SEQ ID NO: 12 or 92; and/or
   [0269] b. the RNA-guided DNA binding agent comprises a sequence with at least 95%, 96%, 97%, 98%, 99%, 100% identity to SEQ ID NO: 12 or 92; and/or
[0270] (ii) a sgRNA or a vector encoding a sgRNA, wherein the sgRNA comprises a sequence of SEQ ID NO: 903.

TABLE 1
The exemplary amino acid sequences involved in this disclosure

| Name | SEQ ID NOs: | Name | SEQ ID NOs: | Name | SEQ ID NOs: |
|---|---|---|---|---|---|
| GEBx0293 | 1 | GEBx0321 | 25 | GEBx0347 | 49 |
| GEBx0294 | 2 | GEBx0323 | 26 | GEBx0348 | 50 |
| GEBx0295 | 3 | GEBx0324 | 27 | GEBx0351 | 51 |
| GEBx0296 | 4 | GEBx0325 | 28 | GEBx0352 | 52 |
| GEBx0299 | 5 | GEBx0326 | 29 | GEBx0353 | 53 |
| GEBx0300 | 6 | GEBx0327 | 30 | GEBx0354 | 54 |
| GEBx0301 | 7 | GEBx0328 | 31 | GEBx0356 | 55 |
| GEBx0303 | 8 | GEBx0329 | 32 | GEBx0357 | 56 |
| GEBx0305 | 9 | GEBx0330 | 33 | GEBx0358 | 57 |
| GEBx0306 | 10 | GEBx0331 | 34 | GEBx0359 | 58 |
| GEBx0307 | 11 | GEBx0332 | 35 | GEBx0360 | 59 |
| GEBx0308 | 12 | GEBx0333 | 36 | GEBx0361 | 60 |
| GEBx0309 | 13 | GEBx0334 | 37 | GEBx0363 | 61 |
| GEBx0310 | 14 | GEBx0335 | 38 | GEBx0364 | 62 |
| GEBx0311 | 15 | GEBx0336 | 39 | GEBx0375 | 63 |
| GEBx0312 | 16 | GEBx0337 | 40 | GEBx0377 | 64 |
| GEBx0313 | 17 | GEBx0338 | 41 | GEBx0378 | 65 |
| GEBx0314 | 18 | GEBx0340 | 42 | GEBx0379 | 66 |
| GEBx0315 | 19 | GEBx0341 | 43 | GEBx0380 | 67 |
| GEBx0316 | 20 | GEBx0342 | 44 | GEBx0381 | 68 |
| GEBx0317 | 21 | GEBx0343 | 45 | GEBx0382 | 69 |
| GEBx0318 | 22 | GEBx0344 | 46 | GEBx0383 | 70 |
| GEBx0319 | 23 | GEBx0345 | 47 | GEBx0384 | 71 |
| GEBx0320 | 24 | GEBx0346 | 48 | | |
| GEBx0293 with | 81 | GEBx0321 with | 105 | GEBx0347 with | 129 |
| NLS and Flag | | NLS and Flag | | NLS and Flag | |
| GEBx0294 with | 82 | GEBx0323 with | 106 | GEBx0348 with | 130 |
| NLS and Flag | | NLS and Flag | | NLS and Flag | |
| GEBx0295 with | 83 | GEBx0324 with | 107 | GEBx0351 with | 131 |
| NLS and Flag | | NLS and Flag | | NLS and Flag | |
| GEBx0296 with | 84 | GEBx0325 with | 108 | GEBx0352 with | 132 |
| NLS and Flag | | NLS and Flag | | NLS and Flag | |
| GEBx0299 with | 85 | GEBx0326 with | 109 | GEBx0353 with | 133 |
| NLS and Flag | | NLS and Flag | | NLS and Flag | |
| GEBx0300 with | 86 | GEBx0327 with | 110 | GEBx0354 with | 134 |
| NLS and Flag | | NLS and Flag | | NLS and Flag | |
| GEBx0301 with | 87 | GEBx0328 with | 111 | GEBx0356 with | 135 |
| NLS and Flag | | NLS and Flag | | NLS and Flag | |
| GEBx0303 with | 88 | GEBx0329 with | 112 | GEBx0357 with | 136 |
| NLS and Flag | | NLS and Flag | | NLS and Flag | |
| GEBx0305 with | 89 | GEBx0330 with | 113 | GEBx0358 with | 137 |
| NLS and Flag | | NLS and Flag | | NLS and Flag | |
| GEBx0306 with | 90 | GEBx0331 with | 114 | GEBx0359 with | 138 |
| NLS and Flag | | NLS and Flag | | NLS and Flag | |
| GEBx0307 with | 91 | GEBx0332 with | 115 | GEBx0360 with | 139 |
| NLS and Flag | | NLS and Flag | | NLS and Flag | |
| GEBx0308 with | 92 | GEBx0333 with | 116 | GEBx0361 with | 140 |
| NLS and Flag | | NLS and Flag | | NLS and Flag | |
| GEBx0309 with | 93 | GEBx0334 with | 117 | GEBx0363 with | 141 |
| NLS and Flag | | NLS and Flag | | NLS and Flag | |
| GEBx0310 with | 94 | GEBx0335 with | 118 | GEBx0364 with | 142 |
| NLS and Flag | | NLS and Flag | | NLS and Flag | |
| GEBx0311 with | 95 | GEBx0336 with | 119 | GEBx0375 with | 143 |
| NLS and Flag | | NLS and Flag | | NLS and Flag | |
| GEBx0312 with | 96 | GEBx0337 with | 120 | GEBx0377 with | 144 |
| NLS and Flag | | NLS and Flag | | NLS and Flag | |
| GEBx0313 with | 97 | GEBx0338 with | 121 | GEBx0378 with | 145 |
| NLS and Flag | | NLS and Flag | | NLS and Flag | |
| GEBx0314 with | 98 | GEBx0340 with | 122 | GEBx0379 with | 146 |
| NLS and Flag | | NLS and Flag | | NLS and Flag | |
| GEBx0315 with | 99 | GEBx0341 with | 123 | GEBx0380 with | 147 |
| NLS and Flag | | NLS and Flag | | NLS and Flag | |
| GEBx0316 with | 100 | GEBx0342 with | 124 | GEBx0381 with | 148 |
| NLS and Flag | | NLS and Flag | | NLS and Flag | |
| GEBx0317 with | 101 | GEBx0343 with | 125 | GEBx0382 with | 149 |
| NLS and Flag | | NLS and Flag | | NLS and Flag | |
| GEBx0318 with | 102 | GEBx0344 with | 126 | GEBx0383 with | 150 |
| NLS and Flag | | NLS and Flag | | NLS and Flag | |
| GEBx0319 with | 103 | GEBx0345 with | 127 | GEBx0384 with | 151 |
| NLS and Flag | | NLS and Flag | | NLS and Flag | |
| GEBx0320 with | 104 | GEBx0346 with | 128 | | |
| NLS and Flag | | NLS and Flag | | | |

Representaive sequences above, NLS and Flag

| Name | SEQ ID NOs: | Sequences |
|---|---|---|
| GEBx0305 | 9 | MGQKDFYLGLDIGTDSVGYAVTDEQYNLLKFSGDAAWGVHLF |
| | | DEAELSQERRAFRVARRRLDRRKQRVMLLQELFAPAIRAVDAD |
| | | FYKRLQASDLFRDEAGDRFPIFNDVDYTDRDYYKAYPTIHHLIC |
| | | DLMADETAHDVRLVYLACAWLVSNRGHFLSNLDKENISALKN |
| | | FDKVYSEFEHFFTDNGYAYPWAEADRRTIGEILKKKTTVTAKN |
| | | KELTLAFTGGGMAPKEASEDFPFGQRAIIKLLAGGTAQLKELFD |
| | | QEAYAEFGAVSLNFDDDKLEEIAGNLGDDFALITALRQVFDWS |
| | | VLVEAIGDAASISEAKVETYRQHKADLAILKRIIKNYRPEKYDE |
| | | VFREIGKANYAAYAYHSNKKADAKFKKVDREAFSKFITGIVKD |
| | | ITPKAEDEEILADMRNRLDLRTFLPKQKNTDNRVIPHQLYQYEL |
| | | HEILKNAEGYLPFLTEKDESGLSVSDKIRSIFAFKIPYFVGPLNEK |
| | | SDHAWIVRKAGKIYPWNFEDIVDLDASEEGFIRRMTNQCTYLP |
| | | GEPVLPKDSLLYHKFTVLNEINNLSIHGERISVELKQQIYSDLFL |
| | | NKKKVTRKRLREYLIVNGVVEKDDTDAITGIDEEIKSNLLPQISF |
| | | RRLLDEGTLSEEDVEKIIERSTFSDDKTRLKKWLAREYPQLNSK |
| | | DVDYIRSLRLRDFGRLSQAFLEGIIAADRSTGEAFTIISALWNTQ |
| | | KNLMELLSDQFTFAETIERFREDYYREHPVSLSERMDEMYLSNS |
| | | VKRSVFRTLDIVKDVKKAFGAPKKIFVEVTRGGSPDQKGKRTK |
| | | SRSQQLRELYDKCRDEDLPLLKQQLEAMGDAADSKLQSEKLFL |
| | | YYLQLGKSAYSDKRIPLEALASKAYDIDHIYPQAFVKDDSIINN |
| | | KVLVLSEENGAKSNNYPIQGSIRHHMQGFWSYLQEVGLMSKE |
| | | KYKRLTRSTPFTEEERYGFINRQLTSTSQSTKAVATLLKEHLPET |
| | | EIVYCKARLVTDFRQAFDLFKSRQYNDLHHAVDAYLNIVTGNV |
| | | YNMRFTKNFNVHSQYSIKTETVFTRPVTYKSQTIWDGIDMLAK |
| | | VKSIANKNTAHITKYAFMKKGGFFDQLPVRAADGLIPRKKHLP |
| | | TQKYGGYNKPGVMFFIPVKYQLGKKSELFILPVELLCGKRFLA |
| | | DPEFAQAYAVKRLERILKKPVDQISFPLGMRPWKVNTVLALDG |
| | | FKYCITGSSNGGTRLILQPMMSFSSAPYWAFYLKKLEVFVEKN |
| | | ANNPQHVYDEAYDKVNCEDNLKLYDLYCQKLTSTIYSKRINSP |
| | | LDILLQGREKFSGLDIKQQAQALLNIHQVFGRIAGGCDLTLVGG |
| | | KKGSAATSASSAISNLGKRYQDVRVWDTSPSGLWSKRSPNLLD |
| | | LL |
| GEBx0308 | 12 | MKQKYYLGLDMGTSSLGWAVTNEKYSLLRKKGKDLWGVRLF |
| | | EEAKTAADRRSYRTARRRLQREKARIGYLRELFSEEINKIDAGF |
| | | FQRLEDSKYHKEDKREHQPFALFADKGYTDREYFEDYPTIFHL |
| | | RKALLDIENEGKTFDVRLVYLAILNMFKHRGHFLNANLDDKSG |
| | | GDLKEKIHILTSMANKLFDDISFKTVDIKDIEQILASKDYSNSTR |
| | | LEKLLELFELSKTKNKVETEIFKMICGLKGTISKIFANESMDEEA |
| | | QKLSFSFRDGNYDEKIVEMEEALSEESYEFIMIMKQVHDWAVL |
| | | SNIMMGEEYLSVARVKAYEKHKKDLNMLKALLKNYSIKEYNS |
| | | MFRIMKDNNYSSYIGSVISQETIRRKGKYTTDDFYKNVKSIVLK |
| | | CEECTEKEYILSEIEKKTFLPKQNTTSNSVIPNQVHKKELKRILE |
| | | NAAKYLEFLNDKDDTGLTVSEKIVRLFEFQIPYYVGPLSNGVCD |
| | | GKNVWSVRREKGAVLPWNFEEKIDVKQSSENFITKLVNHCTYL |
| | | NGETVLPKNSLLYEKFMVLNELNNLKINGVKIGVELKQSIYND |
| | | VFKKGKKVTAKALIQYLKNIGEIDATEETVVSGIDGDFTNRLAN |
| | | YKKFIEIFKVPTLTYEQEQIAEDIIFYSTVYGESKKFLEERIREKY |
| | | NEELSENQIKRILGLKFKDWGRLSKELLLLQGIDKQTGEISSIISK |
| | | MWSDNYNLMELIATDKFSYGYNIEQKTSKIEKVLSDIEYSDLDE |
| | | IYISAPVKRMVWQTILVLKELEKVMGCEPEKIFVEMARDANAP |
| | | KKRTESRKKKFLELYKTCKKESRDWKEELEDTEESKFRSKKLY |
| | | LYYTQKGRCMYSGEEIELKDLFNDNLYDIDHIYPRHFVKDDSIE |
| | | NNLVLVRKVDNAHKSDAVLESSIRNKMCGFWKILREGSFITDE |
| | | KYKRLMRTDDFSDEERAGFISRQIVETRQGTKVIADLFTKTFPE |
| | | SEIIYVKAGNVSDFRKKFDFLKCRIVNDFHHAQDAYLNIVVGN |
| | | VYNTKFTQNPMNFIREYNKDPKANKYHMDKLFEYPVSRNGRD |
| | | AWVTKNAESICMVKKMMEKNTPLITRMNYESHGGIADQTIYS |
| | | AEDAQKAKGKGYISIKSSDGNLLDTCKYGGMKKYTGTYFLLLE |
| | | HTKKEKRIRTIEAMPLYLKDKLNTREKIEKYFEQSVDFAYEQPK |
| | | VILDKIKMYSLIKVDGFYLYLTGRTGNQLSVCNAVQMSLSAGM |
| | | VKYVRKISIANERYAADKEFEKDENISVQKNLELYEILKEKHLN |
| | | QIYGKRPNPVGEKIEKGIEKFRSLSVRKQIYVLLQILQLSQLSNQ |
| | | GADLLEIGGEKKTGTSKLNKNITEKQEFKLINQSVTGLYENEID |
| | | LLRI |
| GEBx0321 | 25 | MSTMSYILGLDLGVASVGWSVIEIDENEMPIRLVDLGVRTFEKA |
| | | EVPKTGESLAKSRREARSIRRLIARRVRRLLLAKKALLEEGILTQ |
| | | NDFLTKSIIKDLPINAWELRAKGLDHKLTSKEWATVLLHLVKHR |
| | | GYLSQRKNESDTADKQLGALLSGVKENHTLLQENKYRTPAELA |
| | | ICKFEKEEGHIRNQNGEYIHTFDRLDLQAELHLLFEKQRQFNNP |
| | | YASAKLEEKMDYLLMYQKPALSGEAILKMLGKCSFETQEYKC |
| | | AKNTYSAERFIWLTKLNNLRILTQGSERGLTESERALLLNQPYQ |
| | | KAKLTYTQVRNILELSESEIFKGLRYGNVEDKKMIEKETLMELK |
| | | AFHQIRKVLEKANLKTEWQGLATKPELLDEIGTIFSLYKTDADIT |
| | | AQLQDKISAPILNALLSGINFDKFINLSLVALSKILPLMEQGQRYD |
| | | EACTSIYGDHYGVKTKEEHLFLPSIDKDEIRNPVVLRCLSQTRKI |
| | | INAVIRLYGSPARIHIETGREVGKSFKERQKIEKNQLENKAKKER |
| | | AIKEFKDLFPYFIGEPKSKDILKMRLYNEQQGKCLYSGKTIDINR |
| | | LLEKGYVEIDHALPFSRTWDDSFNNKVLVLANENQNKANQTPY |
| | | EWFDGKNNTTKWQQFVALVWGSHFNYHKKQHLLLKNLPEGF |
| | | MKRNLNDTRYVARYLMNFINDHIQLTGKGKRRVFASNGQITAL |
| | | LRARWGLMKVRGDNDRHHALDAIVVACTTPSMQNKITDFVRS |
| | | KEMNIFSGEFIDRNTGEIKQIHFPEPWNYFRNEVMIRVFSHDPLL |
| | | ELEQQLPSRPEARHQYVTPLFVSRMPTRKMTGQGHLETIKSAK |
| | | RLAENESVQRIALTSLKLNTLENMANKDKEKALYQALKERLEQ |
| | | FNNDPVKAFAEPFYKKGGQQVKKIRVKQIQKTGVIVHQGNGVA |
| | | DNASMVRVDVFEKANKFYLVPIYTWQVAKGILPNKAAIANKNE |
| | | DEWQEMDESFTFKFSIHPNDLIKVTTKKEVYFGYYVAMDRHTA |
| | | AINIREPDLERSKGKDGLHRGIGVKTALSFEKYDIDPLGKNIRPC |
| | | QPKARQPIR |
| GEBx0326 | 29 | MKQLVLGLDIGITSVGYGIIDIENNEIVDCGVRLFKEGSAAENET |
| | | RREKRGSRRLKSRKVNRIQDMENLLKELGIYENCNLIHNNPYD |
| | | LRIKGLSEKLTNKELTRVCLHYAKRRGSSLDMVEDDETKAKEL |
| | | GETKKILQENDILLKQGYYVCQVQKMNEQKYGKIHGNYNNFR |
| | | TSDYLKEAKQLLSIQGLKEENIEKILNIIQRKRQYYEGPGSLKSP |
| | | TIYGRFIEEDGRIIKIDLIEKMRGHCSIYPEELRAPKMSYSAELFN |
| | | FLNDLNNLKIDEEKITPEQKQEIISIIQTKKNITPLQLSKFLGVEIE |
| | | KISGFRIDKKDKPILTEFKGFKIIAKVLEKNNEKELVKDVKFVDS |
| | | ISEILTRTKDIQERIESIEKLNDNLSKECIYSLANITGIRGYHSLSL |
| | | KAIYEMNEELLNTEMNQMQILQSSKKLEQKINQKGKKNIQEDN |
| | | TAILSPVAKRAIREAIKVVNAARKRYGEFDSIVVETTRDKNSKE |
| | | QKKRIDDAQKYFKKRREEVDEVVNGRPLNAKTREKIRLYMDQ |
| | | DGKCAYSLEPIDLNLIMNDPTAYEIDHIIPISISLDDSFNNKVLVR |
| | | RKANQDKGNETPYNAIKQGKIKNKNLKSVSIQEYQAYVLNLRK |
| | | ENKISNKKKEYLLSQKDYTKLDVRKEFVNRNLIDTSYANRVVF |
| | | NTLEDYFKQNEIDTKVHTIRGAATSAFRKKVNLQKVREEDHSH |
| | | HAIDALIVASIKKLNLLNKLLDVKNIKDVYDDETGEYLPMDDN |
| | | SYFDPKYMNFINQLKDVKITKFSHKIDTKPNRQIADDTIYSTRIIE |
| | | GEEKLIKKYGDIYDPKFDKLTNDILNESYQNKYLMAIHDSKTFD |
| | | KFINIVQDHYNTYKDDSKIYTLDKGKIKLKGDNPLFLYKNEHGF |
| | | VTKYSKKNNGPAITQMKYVDCTLGNRIDITSNYKIKDDKKVVL |
| | | QQISPYRTDFYLDEDGHYQFVTVRYSNIKWKATQQSYIIDKEW |
| | | YKNAKKQKGIQENAKFCFSMHHDELIGFIKEDGEKLIYNDEHN |
| | | LINIMKEHNGKDYEILKFTATNNEGKNIVEVKPIYKYTSDRIKPL |
| | | INKKIIKLAKFATDPLGNLYEVKDSKLKLEL |
| GEBx0328 | 31 | MDKKPPYYIGLDCGTNSVGWAVSDKNYHLLKGTHHIKTEKGT |
| | | KTKKQTLWGFRLFEEAETAAERRIHRSARRRAERAKNRLKLLR |
| | | MLFHDEIVQVDPEFYQRLKESFYLLDDKKLQKNSKNTLFNDSN |
| | | LTDKDFHKKYPTIWHLRQAIINAKDDEAFDIRLYFLAIQHILKHR |
| | | GHFLMEGEINSDGDVDFESIFENFRCEAERVGYNIADVPAEVKE |
| | | LLMQKMSKTDKKKSLKDILYIEGDELDDDVPKGQLELAGLLVG |
| | | SKVDLKKIFSINDDEKFPYSFSEGAFEDKLPDIEMTVGSENLDLI |
| | | FAAKKIYDYVTLDNLLAGNKLISDAMVANYNQHSNDLKKLKQ |
| | | VFRPHREVYDKLFKTKLYNEKFPSYDAYISKAYTEDKSGRKSS |
| | | KNIGQEDFNKHLHKLLEEIKTKTKPELDSLVDELLDRTDTSEKS |
| | | VSPLLLPKQRGQAKGTIPQQLHGKELKYILQKLQKDYPSFAEVT |
| | | PGEDESCNTKAKKIIKIHEFRIPYYCGPIVKRKFDDDGKQVANG |
| | | KSQFSWADEEIAELVYPWNFDKLIKKEQRANNFIRRMTNECTH |
| | | LVGEDVLPKCSLIYQKYMILNELNNLKINGYRIDNQLKQQIFER |
| | | GYKNNEIKGNITLKKLEKWCKDNALISINDEMSGTSEVKTLPKY |
| | | QTYQDFSRILGTDFAHKYSANKLEKVVESITVLGDEKSMLKQSI |
| | | QEILNCDAKTANSLSKLSYKDWGRMSAKFLNGITVNDRTILDY |
| | | LWEDNKNLMELLGQEVGFGKIVEEYNKSKRPVTNRITYHDVES |
| | | LYCSPAVKRSVWQTIRIVDELVKNLQYAPEKIFLEVTRGEDKNA |
| | | KGKYTLARRKDLETKLKAVKTDDARAILKELDGYEDRDLQSK |
| | | KLFLYFSQMGKCAYSGEPISLEELNNSQLYDIDHIYPRSKTKDD |
| | | SITRNLVLVKANLNREKTNNYPISDTIRNKMHGIWSVWYHQGL |
| | | ITKEKYERLTRATPLTNDELGSFIARQLVETSQSVKAIRDLLKQA |
| | | YPKTKIVMVKAGQVSNFRHLMSRDKKDRDGNIYEPGKPEFIKV |
| | | REINDLHHAKDAYLNIVVGNVMNETFTDNPNEWIKRRAGKEY |
| | | SINPERIFRASKTYRKANGEETSYPEVNGWNFAESIQAVSNTMR |
| | | RNDVIWTRMNYIESGEISDLQLVGKSNKADGLLRIKQQERLDP |
| | | KKYGGYNSLKGAHFALIECKDKKGNLQRCIVQIPIIAKNNIENYI |
| | | AENYTDAQVILPIIKYKSLLKADGLLLTISNKDSDLKNGYQHAV |
| | | QAKFQQSISPYLKTICSICAKDKLARNNYQISTEDNVNVEHNLQ |
| | | LFDEFCDKMKIYSGYPELAGGIEKIMLSRTTFSELDLKQQCLTL |
| | | GQMMFIFACKAQNAKLNTIGCGDSVGRIRISNNKLFSYNNLHLI |
| | | NQSPTGLYEEVIDLKTVRPKVNKQDRE |
| GEBx0361 | 60 | MERYYLGLDMGTSSVGWAVTDEKYQIVRKKGKDLWGVRLFPE |
| | | AQTAAERRTNRVARRRRQREKARIGYLRELFANEIQKTDPGFFQ |
| | | RLDDSKYFQEDKMIHQPFALFADSGYTDKEYFQEYPTIYHLRKE |
| | | LLTSTEPHDVRLVYLAVLNMFKHRGHFLNASLTDESIGNLADLF |
| | | ENLRIAVKDQLDVELAYPERMEDLENIFIDKSLSKTEKVEKIKAL |
| | | LKIDKKDRLQAELWKMICGLSGTLSVIFRQDNFSEEDKKYKLSF |
| | | RDGNYDEKINAVAEMLSEESLDVLMLIKQIHDWGVLADIMRGS |
| | | GKTYEYLSFARVDSYEKHKKDLETLKYLYKTYAPEKYHDMFRV |
| | | MKDNNYSAYVGSVNAGNHVERRGYKHKTEDFYSALKKELQN |
| | | FPESAERQYVLNEIEKGTFLPKQLTASNGVVPNQVHMKELKKIL |
| | | ANAEKYLAFLQQTDETGLSVSEKIIQLFGFQIPYYVGPLVNKAD |
| | | NHAWVVRKEGGRVFPWNFEQKVDVKRTSELFIQNMVNHCTYL |
| | | SDEYVLPKNSLLYEKFMVLNELNNLRINGEKISVALKQDIYQDL |
| | | FKSGKKVTAKRLCDYLIVHGYVDNETPIDLSGIDGDFVNRLAN |
| | | YKKFSEVFYVETLTYEQEQMAEQIIFWSTVYGDSKKFLREKIQE |
| | | NYGEVLSSNQIKRILGYKFRDWGRLSREFLLLEGADKTTGEISTI |
| | | ISRMWNENYNLMQLLSSEQFTYREEVEKKTKHMEKTLSEITYE |
| | | DLEDLYISAPVRRMTWQTILILKELCGVLGQYPDKVFVEMARE |
| | | HGEKNTRTVSRKKKFMDLYKSCKDEEIQWAKQIADTEERKFRS |
| | | KKLYLYYTQKGRCMYTGTRIELSDLFNDNLYDIDHIYPRHFVKD |
| | | DNIDNNLVLVKKQVNAHKSDVFPLERDIQKKQAAMWKELRQG |
| | | NFITEEKYKRLTRNDPFTEEEQAGFISRQIVETRQGTKAITDLLQ |
| | | QTCPQSKIIYVKAGNVSAFRQKFDLIKCRNVNDLHHAQDAYLNI |
| | | VVGNVYYTKFTSSPRNFVREYRQNKEKHPYHMYRLFDYDVRR |
| | | GEEVAWEIGKDGKGKSISTVKRMVLKNTPLVTMMNFEVHGGL |
| | | ADQTLYSAKDAKDGEGYLPLKSSDPRLRDVAKYGGFTKYTGT |
| | | YFFVVEYGQEKKRIRSIEAVPLYLAERLSDRENLEVYCRDMLGY |
| | | QDPKIICRKIKMYSLMKINGFYLYLTGRTGTRLNVVNAVQMILD |
| | | YENMYYVKRIADASERKYTDEDYEEHEVISKENNLRLYRQLEE |
| | | KHRDTIYQKRPNPMGSKLQEMEGRFEELSIAQQVKVLLEILKLS |
| | | QRLNQGADLTLLGGAKKTGTSKIGKKISELQECKVINQSVTGM |
| | | YVNEVDLLKK |
| N-terminal NLS | 881 | MAPKKKRKV |
| C-terminal NLS | 882 | KRPAATKKAGQAKKKK |
| FLAG sequence | 883 | DYKDDDDK |

TABLE 2
The exemplary polynucleotides encoding Cas proteins

| | SEQ | | SEQ | | SEQ |
|---|---|---|---|---|---|
| Name | ID NOs: | Name | ID NOs: | Name | ID NOs: |
| GEBx0293 | 161 | GEBx0321 | 185 | GEBx0347 | 209 |
| GEBx0294 | 162 | GEBx0323 | 186 | GEBx0348 | 210 |
| GEBx0295 | 163 | GEBx0324 | 187 | GEBx0351 | 211 |
| GEBx0296 | 164 | GEBx0325 | 188 | GEBx0352 | 212 |
| GEBx0299 | 165 | GEBx0326 | 189 | GEBx0353 | 213 |
| GEBx0300 | 166 | GEBx0327 | 190 | GEBx0354 | 214 |
| GEBx0301 | 167 | GEBx0328 | 191 | GEBx0356 | 215 |
| GEBx0303 | 168 | GEBx0329 | 192 | GEBx0357 | 216 |
| GEBx0305 | 169 | GEBx0330 | 193 | GEBx0358 | 217 |
| GEBx0306 | 170 | GEBx0331 | 194 | GEBx0359 | 218 |
| GEBx0307 | 171 | GEBx0332 | 195 | GEBx0360 | 219 |
| GEBx0308 | 172 | GEBx0333 | 196 | GEBx0361 | 220 |
| GEBx0309 | 173 | GEBx0334 | 197 | GEBx0363 | 221 |
| GEBx0310 | 174 | GEBx0335 | 198 | GEBx0364 | 222 |
| GEBx0311 | 175 | GEBx0336 | 199 | GEBx0375 | 223 |
| GEBx0312 | 176 | GEBx0337 | 200 | GEBx0377 | 224 |
| GEBx0313 | 177 | GEBx0338 | 201 | GEBx0378 | 225 |
| GEBx0314 | 178 | GEBx0340 | 202 | GEBx0379 | 226 |
| GEBx0315 | 179 | GEBx0341 | 203 | GEBx0380 | 227 |
| GEBx0316 | 180 | GEBx0342 | 204 | GEBx0381 | 228 |
| GEBx0317 | 181 | GEBx0343 | 205 | GEBx0382 | 229 |
| GEBx0318 | 182 | GEBx0344 | 206 | GEBx0383 | 230 |
| GEBx0319 | 183 | GEBx0345 | 207 | GEBx0384 | 231 |
| GEBx0320 | 184 | GEBx0346 | 208 | | |
| GEBx0293 with | 241 | GEBx0321 with | 265 | GEBx0347 with | 289 |
| sequence encoding | | sequence encoding | | sequence encoding | |
| NLS and Flag-tag | | NLS and Flag-tag | | NLS and Flag-tag | |
| GEBx0294 with | 242 | GEBx0323 with | 266 | GEBx0348 with | 290 |
| sequence encoding | | sequence encoding | | sequence encoding | |
| NLS and Flag-tag | | NLS and Flag-tag | | NLS and Flag-tag | |
| GEBx0295 with | 243 | GEBx0324 with | 267 | GEBx0351 with | 291 |
| sequence encoding | | sequence encoding | | sequence encoding | |
| NLS and Flag-tag | | NLS and Flag-tag | | NLS and Flag-tag | |
| GEBx0296 with | 244 | GEBx0325 with | 268 | GEBx0352 with | 292 |
| sequence encoding | | sequence encoding | | sequence encoding | |
| NLS and Flag-tag | | NLS and Flag-tag | | NLS and Flag-tag | |
| GEBx0299 with | 245 | GEBx0326 with | 269 | GEBx0353 with | 293 |
| sequence encoding | | sequence encoding | | sequence encoding | |
| NLS and Flag-tag | | NLS and Flag-tag | | NLS and Flag-tag | |
| GEBx0300 with | 246 | GEBx0327 with | 270 | GEBx0354 with | 294 |
| sequence encoding | | sequence encoding | | sequence encoding | |
| NLS and Flag-tag | | NLS and Flag-tag | | NLS and Flag-tag | |
| GEBx0301 with | 247 | GEBx0328 with | 271 | GEBx0356 with | 295 |
| sequence encoding | | sequence encoding | | sequence encoding | |
| NLS and Flag-tag | | NLS and Flag-tag | | NLS and Flag-tag | |
| GEBx0303 with | 248 | GEBx0329 with | 272 | GEBx0357 with | 296 |
| sequence encoding | | sequence encoding | | sequence encoding | |
| NLS and Flag-tag | | NLS and Flag-tag | | NLS and Flag-tag | |
| GEBx0305 with | 249 | GEBx0330 with | 273 | GEBx0358 with | 297 |
| sequence encoding | | sequence encoding | | sequence encoding | |
| NLS and Flag-tag | | NLS and Flag-tag | | NLS and Flag-tag | |
| GEBx0306 with | 250 | GEBx0331 with | 274 | GEBx0359 with | 298 |
| sequence encoding | | sequence encoding | | sequence encoding | |
| NLS and Flag-tag | | NLS and Flag-tag | | NLS and Flag-tag | |
| GEBx0307 with | 251 | GEBx0332 with | 275 | GEBx0360 with | 299 |
| sequence encoding | | sequence encoding | | sequence encoding | |
| NLS and Flag-tag | | NLS and Flag-tag | | NLS and Flag-tag | |
| GEBx0308 with | 252 | GEBx0333 with | 276 | GEBx0361 with | 300 |
| sequence encoding | | sequence encoding | | sequence encoding | |
| NLS and Flag-tag | | NLS and Flag-tag | | NLS and Flag-tag | |
| GEBx0309 with | 253 | GEBx0334 with | 277 | GEBx0363 with | 301 |
| sequence encoding | | sequence encoding | | sequence encoding | |
| NLS and Flag-tag | | NLS and Flag-tag | | NLS and Flag-tag | |
| GEBx0310 with | 254 | GEBx0335 with | 278 | GEBx0364 with | 302 |
| sequence encoding | | sequence encoding | | sequence encoding | |
| NLS and Flag-tag | | NLS and Flag-tag | | NLS and Flag-tag | |
| GEBx0311 with | 255 | GEBx0336 with | 279 | GEBx0375 with | 303 |
| sequence encoding | | sequence encoding | | sequence encoding | |
| NLS and Flag-tag | | NLS and Flag-tag | | NLS and Flag-tag | |
| GEBx0312 with | 256 | GEBx0337 with | 280 | GEBx0377 with | 304 |
| sequence encoding | | sequence encoding | | sequence encoding | |
| NLS and Flag-tag | | NLS and Flag-tag | | NLS and Flag-tag | |
| GEBx0313 with | 257 | GEBx0338 with | 281 | GEBx0378 with | 305 |
| sequence encoding | | sequence encoding | | sequence encoding | |
| NLS and Flag-tag | | NLS and Flag-tag | | NLS and Flag-tag | |
| GEBx0314 with | 258 | GEBx0340 with | 282 | GEBx0379 with | 306 |
| sequence encoding | | sequence encoding | | sequence encoding | |
| NLS and Flag-tag | | NLS and Flag-tag | | NLS and Flag-tag | |
| GEBx0315 with | 259 | GEBx0341 with | 283 | GEBx0380 with | 307 |
| sequence encoding | | sequence encoding | | sequence encoding | |
| NLS and Flag-tag | | NLS and Flag-tag | | NLS and Flag-tag | |
| GEBx0316 with | 260 | GEBx0342 with | 284 | GEBx0381 with | 308 |
| sequence encoding | | sequence encoding | | sequence encoding | |
| NLS and Flag-tag | | NLS and Flag-tag | | NLS and Flag-tag | |
| GEBx0317 with | 261 | GEBx0343 with | 285 | GEBx0382 with | 309 |
| sequence encoding | | sequence encoding | | sequence encoding | |
| NLS and Flag-tag | | NLS and Flag-tag | | NLS and Flag-tag | |
| GEBx0318 with | 262 | GEBx0344 with | 286 | GEBx0383 with | 310 |
| sequence encoding | | sequence encoding | | sequence encoding | |
| NLS and Flag-tag | | NLS and Flag-tag | | NLS and Flag-tag | |
| GEBx0319 with | 263 | GEBx0345 with | 287 | GEBx0384 with | 311 |
| sequence encoding | | sequence encoding | | sequence encoding | |
| NLS and Flag-tag | | NLS and Flag-tag | | NLS and Flag-tag | |
| GEBx0320 with | 264 | GEBx0346 with | 288 | | |
| sequence encoding | | sequence encoding | | | |
| NLS and Flag-tag | | NLS and Flag-tag | | | |

TABLE 3
The exemplary direct repeat sequences described in the disclosure

| Name | SEQ ID NOs: |
|---|---|
| GEBx0293-DR | 341 |
| GEBx0294-DR | 342 |
| GEBx0295-DR | 343 |
| GEBx0296-DR | 344 |
| GEBx0299-DR | 345 |
| GEBx0300-DR | 346 |
| GEBx0301-DR | 347 |
| GEBx0303-DR | 348 |
| GEBx0305-DR | 349 |
| GEBx0306-DR | 350 |
| GEBx0307-DR | 351 |
| GEBx0308-DR | 352 |
| GEBx0309-DR | 353 |
| GEBx0310-DR | 354 |
| GEBx0311-DR | 355 |
| GEBx0312-DR | 356 |
| GEBx0313-DR | 357 |
| GEBx0314-DR | 358 |
| GEBx0315-DR | 359 |
| GEBx0316-DR | 360 |
| GEBx0317-DR | 361 |
| GEBx0318-DR | 362 |
| GEBx0319-DR | 363 |
| GEBx0323-DR | 364 |
| GEBx0324-DR | 365 |
| GEBx0325-DR | 366 |
| GEBx0326-DR | 367 |
| GEBx0327-DR | 368 |
| GEBx0328-DR | 369 |
| GEBx0329-DR | 370 |
| GEBx0330-DR | 371 |
| GEBx0331-DR | 372 |
| GEBx0332-DR | 373 |
| GEBx0333-DR | 374 |
| GEBx0334-DR | 375 |
| GEBx0335-DR | 376 |
| GEBx0336-DR | 377 |
| GEBx337-HPT-V1-DR | 378 |
| GEBx338-HPT-V1-DR | 379 |
| GEBx339-HPT-V1-DR | 380 |
| GEBx340-HPT-V1-DR | 381 |
| GEBx341-HPT-V1-DR | 382 |
| GEBx342-HPT-V1-DR | 383 |
| GEBx343-HPT-V1-DR | 384 |
| GEBx345-HPT-V1-DR | 385 |
| GEBx346-HPT-V1-DR | 386 |
| GEBx347-HPT-V1-DR | 387 |
| GEBx351-HPT-V1-DR | 388 |
| GEBx352-HPT-V1-DR | 389 |
| GEBx353-HPT-V1-DR | 390 |
| GEBx354-HPT-V1-DR | 391 |
| GEBx355-HPT-V1-DR | 392 |
| GEBx355-HPT-V2-DR | 393 |
| GEBx355-HPT-V3-DR | 394 |
| GEBx356-HPT-V1-DR | 395 |
| GEBx357-HPT-V1-DR | 396 |
| GEBx357-HPT-V2-DR | 397 |
| GEBx357-HPT-V3-DR | 398 |
| GEBx359-HPT-V1-DR | 399 |
| GEBx360-HPT-V1-DR | 400 |
| GEBx360-HPT-V2-DR | 401 |
| GEBx0361-HPT-V1-DR | 402 |
| GEBx0361-HPT-V2-DR | 403 |
| GEBx362-HPT-V1-DR | 404 |
| GEBx362-HPT-V2-DR | 405 |
| GEBx363-HPT-V1-DR | 406 |
| GEBx363-HPT-V2-DR | 407 |
| GEBx364-HPT-V1-DR | 408 |
| GEBx375-HPT-V1-DR | 409 |
| GEBx375-HPT-V2-DR | 410 |
| GEBx377-HPT-V1-DR | 411 |
| GEBx378-HPT-V1-DR | 412 |
| GEBx379-HPT-V1-DR | 413 |
| GEBx381-HPT-V1-DR | 414 |
| GEBx382-HPT-V1-DR | 415 |
| GEBx383-HPT-V1-DR | 416 |
| GEBx384-HPT-V1-DR | 417 |

[0271] In some embodiments, this disclosure provides an engineered, non-naturally occurring crRNA, wherein the crRNA comprises a nucleotide sequence having at least 90% sequence identity to any one of SEQ ID NOs: 341-417 (Table 3), or a variant thereof. In some embodiments, the crRNA comprises a nucleotide sequence having at least 95% or 98% sequence identity to any one of SEQ ID NOs: 341-417. In some embodiments, the crRNA comprises a nucleotide sequence set forth in any one of SEQ ID NOs: 341-417.

[0272] The following non-limiting examples are provided to further illustrate embodiments of the disclosure disclosed herein. It should be appreciated by those of skill in the art that the techniques disclosed in the examples that follow represent approaches that have been found to function well in the practice of the disclosure, and thus can be considered to constitute examples of modes for its practice. Those of skill in the art should, in light of the present disclosure, appreciate that many changes can be made in the specific embodiments that are disclosed and still obtain a like or similar result without departing from the spirit and scope of the disclosure.

### Example 1: a Method of Metagenomic Analysis for the Proteins

[0273] Metagenomic sequence data from public databases were search using Hidden Markov Models generated based on known Cas protein sequences including class 2 type II Cas effector proteins. CRISPR-Cas protein identified by the search are aligned to known proteins to identify potential active sites. After screening through hundreds of potential sequences, this metagenomic workflow results in the delineation of the type II Cas protein as detailed in Table 1.

[0274] The phylogenetic tree was generated using MUSCLE 3 (Veen et al., 2020) to explore the relationships among orthologs at the primary amino-acid level. This exploration made use of hundreds of Class 2 Type II-A/B/C sequences sourced from the National Center for Biotechnology Information (NCBI), as well as from various publications and patents. Notably, the phylogenetic tree suggests that the Cas protein described in this invention is distinct from those previously known. The Type II Cas proteins detailed in this disclosure share only a low degree of identity with other known Cas proteins.

[0275] The structural modeling of the Type II Cas protein was accomplished using AlphaFold2. The domain arrangement was annotated, revealing that the Cas protein disclosed in this invention comprises a RuvC domain, a BH (bridge helix) domain, a REC domain, an HNH domain, and a CTD (C-terminal domain). Notably, the RuvC domain includes three distinct RuvC sub-domains, along with the BH domain. FIG. 1 provides a visual representation of some exemplary proteins' structure.

### Example 2: Protocol for Predicted RNA Folding

[0276] Predicted RNA folding of the putative guide RNA sequences of the Cas proteins were computed using the RNAfold webserver developed by Lorenz et al 2011.

### Example 3: PAM Determination in Mammalian Cell Line

[0277] In a set of experiments, the HEK293T cells were cultured in DMEM media supplemented with 10% fetal bovine serum (Gibco™). For reverse transfection, the HEK293T cells were cultured in DMEM media supplemented with 10% fetal bovine serum (Gibco™). A volume of 450 μL of cells with a density of 120,000 cells/well was mixed with 50 μL mixture containing Lipofectamine™ 3000 (ThermoFisher Scientific, Cat. L3000008), Opti-Mem (Volume refill to 50 L), 1 μL dsODN (2.5 pM), 100 ng (˜1 μL) psgRNA harbored sgRNA scaffold (Table 6) and Humanspacer3 spacer (SEQ ID NO: 885, Table 4) encoding sequences and 400 ng (˜1 L) pCas protein plasmid harbored Cas9 CDS with NLS and FLAG encoding sequences (Table 2) per the manufacturer's protocol. Then seeded the cell mixture onto a 24-well plate and cultured at 37° C. and 5% CO₂. 10 pM dsODN was annealed using dsODN-Top and dsODN-BoT oligonucleotides pre-transfection.

[0278] 72 hours post-transfection, the supernatant was removed and the cell layer was washed by PBS. Then the genomic DNA was extracted from each well of a 24-well plate using DNA Extraction solution (Denogen (Beijing) Bio Sci & Tech Co. Ltd, Cat. DNS033-48) per manufacturer's protocol. All DNA samples (500 ng, 260/280 value: 1.8-2.0) were subjected to Guide-Seq NGS analyses.

[0279] The basic method of Guide-Seq library preparation is described by Nikolay et. al (Nat. Protoc. 2021). The extracted DNA sample were first sheared using KAPAFrag Kit (Cat #KK8602, Roche). Fragmented DNA was purified and then phosphorated using T4 Polynucleotide Kinase (Cat #M0201S, NEB). An SS5-adapter (generated by annealing 10 M SS5TOP oligo with 10 μM SS5B™ oligo) was ligated to the fragmented DNA using Quick Ligation™ Kit (Cat #M2200S, NEB), followed by two steps off-target PCR to add chemistry for sequencing.

[0280] For off-target PCR1 was performed using Platinum™ Taq DNA Polymerase (Cat #15966005, Invitrogen) with GSP1 (a mixture of GSP1-Top and GSP1-BoT) and Y_XX oligos. For off-target PCR2 was performed using Platinum™ Taq DNA Polymerase with GSP2 (a mixture of GSP2-TopA/B/C and GSP1-BoTA/B/C), Y_XX (Same to PCR1) and i753_XX oligos. The DNA product in each step described above need purification using SPRI Select (Cat #B23318, Beckman Coulter). The final library was quantified with PCR and sequenced on Illumina NextSeq 1000. The reads were aligned to a reference genome after eliminating those having low quality scores. Q30 rate is more than 0.9. The reads length is between 130 bp-140 bp. The resulting files containing the reads were mapped to the reference genome (BAM files), where reads that overlapped the target region of interest were selected.

TABLE 4
The nucleotide sequences referred to in the example.

| | SEQ ID | |
|---|---|---|
| Name | NOs: | 5′-3′ |
| Humanspacer3 | 885 | GTGAGCCACTGTGCCTGGCC |
| dsODN-Top | 886 | pACTTCGGTACGCGTCGACGTACGGTCGACGAGTCGCGCGTACGAC |
| | | GATCGA*G*A*C |
| dsODN-BOT | 887 | pGTCTCGATCGTCGTACGCGCGACTCGTCGACCGTACGTCGACGCG |
| | | TACCGA*A*G*T |
| SS5TOP | 888 | A*A*C*TACACGACGCTCTTCCGATCTNNNWNNNWNNAGTGACAC |
| SS5BTM | 889 | NNNNNNGTGTCACTNNWNNNWNNNAGATCGGAAGAGCGTCGTGT |
| | | AGTTp |
| GSP1-Top | 890 | GTCGACGAGTCGCGCGTA |
| GSP1-BoT | 891 | TCGTCGACCGTACGTCGA |
| GSP2-TopA | 892 | GTGACTGGAGTTCAGACGTGTGCTCTTCCGATCTCGCGCGTACGAC |
| | | GAT*C*G*A |
| GSP2-TopB | 893 | GTGACTGGAGTTCAGACGTGTGCTCTTCCGATCTATCGCGCGTACG |
| | | ACGAT*C*G*A |
| GSP2-TopC | 894 | GTGACTGGAGTTCAGACGTGTGCTCTTCCGATCTTAACGCGCGTAC |
| | | GACGAT*C*G*A |
| GSP2-BoTA | 895 | GTGACTGGAGTTCAGACGTGTGCTCTTCCGATCTTACGTCGACGCG |
| | | TAC*C*G*A |
| GSP2-BoTB | 896 | GTGACTGGAGTTCAGACGTGTGCTCTTCCGATCTGCTACGTCGACG |
| | | CGTAC*C*G*A |
| GSP2-BoTC | 897 | GTGACTGGAGTTCAGACGTGTGCTCTTCCGATCTATGTACGTCGAC |
| | | GCGTAC*C*G*A |
| Y_XX | 898 | AATGATACGGCGACCACCGAGATCTACACNNNNNNNNACACTCTTT |
| | | CCCTACACGACGCTCTTCCGATCT |
| i753_XX | 899 | CAAGCAGAAGACGGCATACGAGATNNNNNNNNGTGACTGGAGTTC |
| | | AGACGTGTGCTCTTCCGATCT |

Note:
“p” denotes a phosphorylation modification; “*” denotes a phosphorothioate (PS) bond; “N” denotes any natural or non-natural nucleotide.

[0281] The PAM preference of some exemplary Cas proteins indicated in TEK293 cell line when using the corresponding sgRNA scaffold is shown in FIGS. 2A-2E and Table 5.

TABLE 5
The PAM preference of the exemplary Cas proteins

| Protein | Spacer | sgRNA scaffold | PAM sequence |
|---|---|---|---|
| GEBx0305 (SEQ ID NO: 89) | Humanspacer3 | GEBx0305-HPT-V1 | NRRANH |
| GEBx0308 (SEQ ID NO: 92) | SEQ ID NO: 885 | GEBx0308-PT-V1 | NRHACT |
| GEBx0315 (SEQ ID NO: 99) | | GEBx0315-PT-V1 | NRAAR |
| GEBx0317 (SEQ ID NO: 101) | | GEBx0317-PT-V1 | NNNCCY |
| GEBx0318 (SEQ ID NO: 102) | | GEBx0318-PT-V1 | NNRYYYY |
| GEBx0320 (SEQ ID NO: 104) | | GEBx0320-HPT-V2 | NGG |
| GEBx0321 (SEQ ID NO: 105) | | GEBx0321-PT-V1 | NNNNCAA |
| GEBx0324 (SEQ ID NO: 107) | | GEBx0324-PT-V1 | NRNAC |
| GEBx0326 (SEQ ID NO: 109) | | GEBx0326-HPT-V1 | NNGR |
| GEBx0327 (SEQ ID NO: 110) | | GEBx0327-HPT-V1 | NGGNR |
| GEBx0328 (SEQ ID NO: 111) | | GEBx0328-PT-V1 | NNNCCH |
| GEBx0333 (SEQ ID NO: 116) | | GEBx0333-PT-V1 | NRRAAG |
| GEBx0334 (SEQ ID NO: 117) | | GEBx0334-PT-V1 | NRHRAC |
| GEBx0335 (SEQ ID NO: 118) | | GEBx0335-PT-V1 | NRYART |
| GEBx0341 (SEQ ID NO: 123) | | GEBx0341-HPT-V1 | NRHACC |
| GEBx0342 (SEQ ID NO: 124) | | GEBx0342-HPT-V1 | NRAAR |
| GEBx0351 (SEQ ID NO: 131) | | GEBx0351-HPT-V1 | NRNVHH |
| GEBx0357 (SEQ ID NO: 136) | | GEBx0357-HPT-V2 | YMACAW |
| GEBx0360 (SEQ ID NO: 139) | | GEBx0360-HPT-V2 | NAHAA |
| GEBx0361 (SEQ ID NO: 140) | | GEBx0361-HPT-V2 | NRHAYY |
| GEBx0381 (SEQ ID NO: 148) | | GEBx0381-HPT-V1 | NGGHA |

### Example 4: In Vitro Editing Efficiency Screening of the CRISPR-Cas System in Mammalian Cell Line

[0282] In a set of experiments, the HTEK293T cells were cultured in DMVEM media supplemented with 1000 fetal bovine serum (Gibco™). For reverse transfection, the HEK293T cells were cultured in DMVEM media supplemented with 10% fetal bovine serum (Gibco™). A volume of 250 μL of cells with a density of 50,000 cells/well was seeded onto a 48-well plate 24 hours pre-transfection. Cells were transfected with a lipoplex containing Lipofectamine™ 3000 (0.4 μL/well), P3000 (2 μL/well), pgRNA/pCas protein plasmid (125 ng/well and 375 ng/well, respectively) and Opti-Mem up to 25 μL/well per the manufacturer's protocol. Plated cells were allowed to settle and adhere for 72 hours in a tissue culture incubator at 37° C. and 5% CO₂ atmosphere. The nucleotide sequences of the pgRNA used in this example comprises sequences encoding the corresponding Cas sgRNA scaffold (Table 6; SEQ ID NO: 465 (GEBx0305), SEQ ID NO: 451 (GEBx0308), SEQ ID NO: 454 (GEBx0308-Rq-V3), SEQ ID NO: 478 (spCas9), SEQ ID NO: 491 and SEQ ID NO: 548) and the corresponding spacers (Table 7).

[0283] 72 hours post-transfection, the supernatant was removed and the cell layer was washed by PBS. Then the genomic DNA was extracted from each well of a 24-well plate using DNA Extraction solution (Denogen (Beijing) Bio Sci & Tech Co. Ltd, Cat. DNS033-48) per manufacturer's protocol. All DNA samples (500 ng, 260/280 value: 1.8-2.0) were subjected to amplicons NGS analyses.

[0284] To quantitatively determine the efficiency of editing at the target location in the genome, NGS was utilized to identify the presence of insertions and deletions introduced by gene editing. Primers used for NGS which around the target area within the endogenous genes were designed. Additional PCR was performed per the manufacturer's protocols (Illumina) to add chemistry for sequencing. The amplicons were sequenced on Illumina iSeq 100. The reads were aligned to a reference genome after eliminating those having low quality scores. Q30 rate is more than 0.9. The reads length is between 130 bp-140 bp. The resulting files containing the reads were mapped to the reference genome (BAM files), where reads that overlapped the target region of interest were selected and the number of wild types reads versus the number of reads which contain an insertion, substitution, or deletion was calculated. The number of the reads mapped the reference genome is more than 1000.

TABLE 6
The sgRNA scaffold sequences of the corresponding Cas proteins.

| Name | SEQ ID NOs: |
|---|---|
| GEBx0299-Pt-V1 | 431 |
| GEBx0304-Pt-V1 | 432 |
| GEBx0308-Pt-V1 (WT) | 433 |
| GEBx0309-Pt-V1 | 434 |
| GEBx0310-Pt-V1 | 435 |
| GEBx0310-Pt-V2 | 436 |
| GEBx0314-Pt-V1 | 437 |
| GEBx0314-Pt-V2 | 438 |
| GEBx0315-Pt-V1 | 439 |
| GEBx0315-Rq | 440 |
| GEBx0316-Pt-V1 | 441 |
| GEBx0317-Pt-V1 | 442 |
| GEBx0318-Rq-V1 | 443 |
| GEBx0318-Rq-V2 | 444 |
| GEBx0318-Rq-V3 | 445 |
| GEBx0318-Rq-V4 | 446 |
| GEBx0321-Pt-V1 | 447 |
| GEBx0321-Pt-V2 | 448 |
| GEBx0309-Rq-V1 | 449 |
| GEBx0309-Rq-V2 | 450 |
| GEBx0308-PT-V1 (WT) | 451 |
| GEBx0308-Rq-V1 | 452 |
| GEBx0308-Rq-V2 | 453 |
| GEBx0308-Rq-V3 (M0) | 454 |
| GEBx0308-M1 | 455 |
| GEBx0308-M2 | 456 |
| GEBx0308-M3 | 457 |
| GEBx0308-M4 | 458 |
| GEBx0308-M5 | 459 |
| GEBx0308-M6 | 460 |
| GEBx0314-Rq-V1 | 461 |
| GEBx0295-HPT-V1 | 462 |
| GEBx0296-HPT-V1 | 463 |
| GEBx0297-HPT-V1 | 464 |
| GEBx0305-HPT-V1 (WT) | 465 |
| GEBx0305-Rq-V2 (M0) | 466 |
| GEBx0305-M1 | 467 |
| GEBx0305-M2 | 468 |
| GEBx0305-M3 | 469 |
| GEBx0305-M4 | 470 |
| GEBx0305-M5 | 471 |
| GEBx0305-M6 | 472 |
| GEBx0306-HPT-V1 | 473 |
| GEBx0313-HPT-V1 | 474 |
| GEBx0319-HPT-V1 | 475 |
| GEBx0320-HPT-V1 | 476 |
| GEBx0320-HPT-V2 | 477 |
| SpCas9 sgRNA in plasmid | 478 |
| GEBx0318-pt-v1 | 479 |
| GEBx0323-Rq-V1 | 480 |
| GEBx0324-PT-V1 | 481 |
| GEBx0324-HPT-V1 | 482 |
| GEBx0324-HPT-V1 | 483 |
| GEBx0325-PT-V1 | 484 |
| GEBx0325-HPT-V1 | 485 |
| GEBx0325-HPT-V2 | 486 |
| GEBx0326-HPT-V1 | 487 |
| GEBx0327-PT-V1 | 488 |
| GEBx0327-HPT-V1 | 489 |
| GEBx0327-HPT-V1 | 490 |
| GEBx0328-PT-V1 | 491 |
| GEBx0328-Rq-V1 | 492 |
| GEBx0328-M1 | 493 |
| GEBx0328-M2 | 494 |
| GEBx0328-M3 | 495 |
| GEBx0328-M4 | 496 |
| GEBx0328-M5 | 497 |
| GEBx0328-M6 | 498 |
| GEBx0328-M7 | 499 |
| GEBx0328-M8 | 500 |
| GEBx0329-PT-V1 | 501 |
| GEBx0329-HPT-V1 | 502 |
| GEBx0329-HPT-V2 | 503 |
| GEBx0330-PT-V1 | 504 |
| GEBx0330-HPT-V1 | 505 |
| GEBx0330-HPT-V2 | 506 |
| GEBx0332-PT-V1 | 507 |
| GEBx0332-HPT-V1 | 508 |
| GEBx0332-HPT-V2 | 509 |
| GEBx0333-PT-V1 | 510 |
| GEBx0333-HPT-V1 | 511 |
| GEBx0333-HPT-V2 | 512 |
| GEBx0334-PT-V1 | 513 |
| GEBx0334-HPT-V1 | 514 |
| GEBx0334-HPT-V2 | 515 |
| GEBx0335-PT-V1 | 516 |
| GEBx0335-HPT-V1 | 517 |
| GEBx0335-HPT-V2 | 518 |
| GEBx0331-HPT-V1 | 519 |
| GEBx0336-HPT-V1 | 520 |
| GEBx0336-HPT-V2 | 521 |
| GEBx0336-HPT-V3 | 522 |
| GEBx0337-HPT-V1 | 523 |
| GEBx0338-HPT-V1 | 524 |
| GEBx0339-HPT-V1 | 525 |
| GEBx0340-HPT-V1 | 526 |
| GEBx0341-HPT-V1 | 527 |
| GEBx0342-HPT-V1 | 528 |
| GEBx0343-HPT-V1 | 529 |
| GEBx0345-HPT-V1 | 530 |
| GEBx0346-HPT-V1 | 531 |
| GEBx0347-HPT-V1 | 532 |
| GEBx0351-HPT-V1 | 533 |
| GEBx0352-HPT-V1 | 534 |
| GEBx0353-HPT-V1 | 535 |
| GEBx0354-HPT-V1 | 536 |
| GEBx0355-HPT-V1 | 537 |
| GEBx0355-HPT-V2 | 538 |
| GEBx0355-HPT-V3 | 539 |
| GEBx0356-HPT-V1 | 540 |
| GEBx0357-HPT-V1 | 541 |
| GEBx0357-HPT-V2 | 542 |
| GEBx0357-HPT-V3 | 543 |
| GEBx0359-HPT-V1 | 544 |
| GEBx0360-HPT-V1 | 545 |
| GEBx0360-HPT-V2 | 546 |
| GEBx0361-HPT-V1 | 547 |
| GEBx0361-HPT-V2 | 548 |
| GEBx0362-HPT-V1 | 549 |
| GEBx0362-HPT-V2 | 550 |
| GEBx0363-HPT-V1 | 551 |
| GEBx0363-HPT-V2 | 552 |
| GEBx0364-HPT-V1 | 553 |
| GEBx0375-HPT-V1 | 554 |
| GEBx0375-HPT-V2 | 555 |
| GEBx0377-HPT-V1 | 556 |
| GEBx0378-HPT-V1 | 557 |
| GEBx0379-HPT-V1 | 558 |
| GEBx0381-HPT-V1 | 559 |
| GEBx0382-HPT-V1 | 560 |
| GEBx0383-HPT-V1 | 561 |
| GEBx0384-HPT-V1 | 562 |

[0285] The spacer sequence is located at the 5′ end of the scaffold. And the 3′ end of each spacer sequence is directly linked to the 5′ end of the subsequent scaffold sequence, forming the characteristic repeat-spacer pattern.

TABLE 7
The exemplary spacer sequences

| SEQ | |
|---|---|
| ID | Name or description |
| NOs | of the spacer |
| 571 | CFTR-NGGAAAA-T1 for |
| | GEBx0305 |
| 572 | CFTR-NGGAAAA-T1 for |
| | SpCas9 |
| 573 | CFTR-NGGAAAA-T2 for |
| | GEBx0305 |
| 574 | CFTR-NGGAAAA-T2 for |
| | SpCas9 |
| 575 | CFTR-NGGAAAA-T3 for |
| | GEBx0305 |
| 576 | CFTR-NGGAAAA-T3 for |
| | SpCas9 |
| 577 | CFTR-NGGAAAA-T4 for |
| | GEBx0305 |
| 578 | CFTR-NGGAAAA-T4 for |
| | SpCas9 |
| 579 | CFTR-NGGAAAA-T5 for |
| | GEBx0305 |
| 580 | CFTR-NGGAAAA-T5 for |
| | SpCas9 |
| 581 | EMX1-NGGAAAA-T1 for |
| | GEBx0305 |
| 582 | EMX1-NGGAAAA-T1 for |
| | SpCas9 |
| 583 | EMX1-NGGAAAA-T2 for |
| | GEBx0305 |
| 584 | EMX1-NGGAAAA-T2 for |
| | SpCas9 |
| 585 | EMX1-NGGAAAA-T3 for |
| | GEBx0305 |
| 586 | EMX1-NGGAAAA-T3 for |
| | SpCas9 |
| 587 | EMX1-NGGAAAA-T4 for |
| | GEBx0305 |
| 588 | EMX1-NGGAAAA-T4 for |
| | SpCas9 |
| 589 | EMX1-NGGAAAA-T5 for |
| | GEBx0305 |
| 590 | EMX1-NGGAAAA-T5 for |
| | SpCas9 |
| 591 | POLQ-NGGAAAA-TI for |
| | GEBx0305 |
| 592 | POLQ-NGGAAAA-T1 for |
| | SpCas9 |
| 593 | POLQ-NGGAAAA-T2 for |
| | GEBx0305 |
| 594 | POLQ-NGGAAAA-T2 for |
| | SpCas9 |
| 595 | POLQ-NGGAAAA-T3 for |
| | GEBx0305 |
| 596 | POLQ-NGGAAAA-T3 for |
| | SpCas9 |
| 597 | POLQ-NGGAAAA-T4 for |
| | GEBx0305 |
| 598 | POLQ-NGGAAAA-T4 for |
| | SpCas9 |
| 599 | POLQ-NGGAAAA-T5 for |
| | GEBx0305 |
| 600 | POLQ-NGGAAAA-T5 for |
| | SpCas9 |
| 601 | TTR-NGGAAAA-T1 for |
| | GEBx0305 |
| 602 | TTR-NGGAAAA-TI for |
| | SpCas9 |
| 603 | TTR-NGGAAAA-T2 for |
| | GEBx0305 |
| 604 | TTR-NGGAAAA-T2 for |
| | SpCas9 |
| 605 | TTR-NGGAAAA-T3 for |
| | GEBx0305 |
| 606 | TTR-NGGAAAA-T3 for |
| | SpCas9 |
| 607 | TTR-NGGAAAA-T4 for |
| | GEBx0305 |
| 608 | TTR-NGGAAAA-T4 for |
| | SpCas9 |
| 609 | TTR-NGGAAAA-T5 for |
| | GEBx0305 |
| 610 | TTR-NGGAAAA-T5 for |
| | SpCas9 |
| 611 | CD34-NGGTACT-T1 for |
| | GEBx0308 |
| 612 | CD34-NGGTACT-T1 for |
| | SpCas9 |
| 613 | CD34-NGGTACT-T2 for |
| | GEBx0308 |
| 614 | CD34-NGGTACT-T2 for |
| | SpCas9 |
| 615 | CD34-NGGTACT-T3 for |
| | GEBx0308 |
| 616 | CD34-NGGTACT-T3 for |
| | SpCas9 |
| 617 | CD34-NGGTACT-T4 for |
| | GEBx0308 |
| 618 | CD34-NGGTACT-T4 for |
| | SpCas9 |
| 619 | CFTR-NGGTACT-T1 for |
| | GEBx0308 |
| 620 | CFTR-NGGTACT-T1 for |
| | SpCas9 |
| 621 | CFTR-NGGTACT-T2 for |
| | GEBx0308 |
| 622 | CFTR-NGGTACT-T2 for |
| | SpCas9 |
| 623 | CFTR-NGGTACT-T3 for |
| | GEBx0308 |
| 624 | CFTR-NGGTACT-T3 for |
| | SpCas9 |
| 625 | CFTR-NGGTACT-T4 for |
| | GEBx0308 |
| 626 | CFTR-NGGTACT-T4 for |
| | SpCas9 |
| 627 | CFTR-NGGTACT-T5 for |
| | GEBx0308 |
| 628 | CFTR-NGGTACT-T5 for |
| | SpCas9 |
| 629 | EMX1-NGGTACT-T1 for |
| | GEBx0308 |
| 630 | EMX1-NGGTACT-T1 for |
| | SpCas9 |
| 631 | EMX1-NGGTACT-T2 for |
| | GEBx0308 |
| 632 | EMX1-NGGTACT-T2 for |
| | SpCas9 |
| 633 | EMX1-NGGTACT-T3 for |
| | GEBx0308 |
| 634 | EMX1-NGGTACT-T3 for |
| | SpCas9 |
| 635 | EMX1-NGGTACT-T4 for |
| | GEBx0308 |
| 636 | EMX1-NGGTACT-T4 for |
| | SpCas9 |
| 637 | EMX1-NGGTACT-T5 for |
| | GEBx0308 |
| 638 | EMX1-NGGTACT-T5 for |
| | SpCas9 |
| 639 | POLQ-NGGTACT-T1 for |
| | GEBx0308 |
| 640 | POLQ-NGGTACT-T1 for |
| | SpCas9 |
| 641 | POLQ-NGGTACT-T2 for |
| | GEBx0308 |
| 642 | POLQ-NGGTACT-T2 for |
| | SpCas9 |
| 643 | POLQ-NGGTACT-T3 for |
| | GEBx0308 |
| 644 | POLQ-NGGTACT-T3 for |
| | SpCas9 |
| 645 | POLQ-NGGTACT-T4 for |
| | GEBx0308 |
| 646 | POLQ-NGGTACT-T4 for |
| | SpCas9 |
| 647 | POLQ-NGGTACT-T5 for |
| | GEBx0308 |
| 648 | POLQ-NGGTACT-T5 for |
| | SpCas9 |
| 649 | TTR-NGGTACT-T1 for |
| | GEBx0308 |
| 650 | TTR-NGGTACT-T1 for |
| | SpCas9 |
| 651 | VEGFA-AAAAAA-T1 for |
| | GEBx0305 |
| 652 | VEGFA-AAAAAA-T2 for |
| | GEBx0305 |
| 653 | VEGFA-AAAAAA-T3 for |
| | GEBx0305 |
| 654 | VEGFA-AAAAAA-T4 for |
| | GEBx0305 |
| 655 | RNF2-AAAAAA-T1 for |
| | GEBx0305 |
| 656 | RNF2-AAAAAA-T2 for |
| | GEBx0305 |
| 657 | RNF2-AAAAAA-T3 for |
| | GEBx0305 |
| 658 | RNF2-AAAAAA-T4 for |
| | GEBx0305 |
| 659 | CD34-CATACT-T1 for |
| | GEBx0308 |
| 660 | CD34-CATACT-T2 for |
| | GEBx0308 |
| 661 | CFTR-CATACT-TI for |
| | GEBx0308 |
| 662 | CFTR-CATACT-T2 for |
| | GEBx0308 |
| 663 | CFTR-CATACT-T3 for |
| | GEBx0308 |
| 664 | CFTR-CATACT-T4 for |
| | GEBx0308 |
| 665 | CFTR-CATACT-T5 for |
| | GEBx0308 |
| 666 | RFN2-CATACT-TI for |
| | GEBx0308 |
| 667 | RFN2-CATACT-T2 for |
| | GEBx0308 |
| 668 | RFN2-CATACT-T3 for |
| | GEBx0308 |
| 669 | RFN2-CATACT-T4 for |
| | GEBx0308 |
| 676 | POLQ-CATACT-TI for |
| | GEBx0308 |
| 671 | POLQ-CATACT-T2 for |
| | GEBx0308 |
| 672 | POLQ-CATACT-T3 for |
| | GEBx0308 |
| 673 | POLQ-CATACT-T4 for |
| | GEBx0308 |
| 674 | POLQ-CATACT-T5 for |
| | GEBx0308 |
| 675 | CD34-TATACT-TI for |
| | GEBx0308 |
| 676 | CD34-TATACT-T2 for |
| | GEBx0308 |
| 677 | CD34-TATACT-T4 for |
| | GEBx0308 |
| 678 | CD34-TATACT-T5 for |
| | GEBx0308 |
| 679 | CD34-TATACT-T7 for |
| | GEBx0308 |
| 680 | CFTR-TATACT-T2 for |
| | GEBx0308 |
| 681 | CFTR-TATACT-T5 for |
| | GEBx0308 |
| 682 | DNMT1-TATACT-T1 |
| | for GEBx0308 |
| 683 | POLQ-TATACT-TI for |
| | GEBx0308 |
| 684 | POLQ-TATACT-T2 for |
| | GEBx0308 |
| 685 | POLQ-TATACT-T5 for |
| | GEBx0308 |
| 686 | POLQ-TATACT-T6 for |
| | GEBx0308 |
| 687 | CD34-TATACT-T3 for |
| | GEBx0308 |
| 688 | CD34-TATACT-T6 for |
| | GEBx0308 |
| 689 | CFTR-TATACT-T1 for |
| | GEBx0308 |
| 690 | CFTR-TATACT-T3 for |
| | GEBx0308 |
| 691 | CFTR-TATACT-T4 for |
| | GEBx0308 |
| 692 | POLQ-TATACT-T3 for |
| | GEBx0308 |
| 693 | POLQ-TATACT-T4 for |
| | GEBx0308 |
| 694 | CFTR-NGGAAAA-T3- |
| | 18nt for GEBx0305 |
| 695 | CFTR-NGGAAAA-T3- |
| | 19nt for GEBx0305 |
| 696 | CFTR-NGGAAAA-T3- |
| | 21nt for GEBx0305 |
| 697 | CFTR-NGGAAAA-T3- |
| | 22nt for GEBx0305 |
| 698 | CFTR-NGGAAAA-T3- |
| | 23nt for GEBx0305 |
| 699 | CFTR-NGGAAAA-T3- |
| | 24nt for GEBx0305 |
| 700 | CFTR-NGGAAAA-T3- |
| | 25nt for GEBx0305 |
| 701 | POLQ-NGGAAAA-T5- |
| | 18nt for GEBx0305 |
| 702 | POLQ-NGGAAAA-T5- |
| | 19nt for GEBx0305 |
| 703 | POLQ-NGGAAAA-T5- |
| | 21nt for GEBx0305 |
| 704 | POLQ-NGGAAAA-T5- |
| | 22nt for GEBx0305 |
| 705 | POLQ-NGGAAAA-T5- |
| | 23nt for GEBx0305 |
| 706 | POLQ-NGGAAAA-T5- |
| | 24nt for GEBx0305 |
| 707 | POLQ-NGGAAAA-T5- |
| | 25nt for GEBx0305 |
| 708 | CFTR-NGGTACT-T4- |
| | 18nt for GEBx0308 |
| 709 | CFTR-NGGTACT-T4- |
| | 19nt for GEBx0308 |
| 710 | CFTR-NGGTACT-T4- |
| | 21nt for GEBx0308 |
| 711 | CFTR-NGGTACT-T4- |
| | 22nt for GEBx0308 |
| 712 | CFTR-NGGTACT-T4- |
| | 23nt for GEBx0308 |
| 713 | CFTR-NGGTACT-T4- |
| | 24nt for GEBx0308 |
| 714 | CFTR-NGGTACT-T4- |
| | 25nt for GEBx0308 |
| 715 | CD34-TATACT-T2- |
| | 18nt for GEBx0308 |
| 716 | CD34-TATACT-T2- |
| | 19nt for GEBx0308 |
| 717 | CD34-TATACT-T2- |
| | 21nt for GEBx0308 |
| 718 | CD34-TATACT-T2- |
| | 22nt for GEBx0308 |
| 719 | CD34-TATACT-T2- |
| | 23nt for GEBx0308 |
| 720 | CD34-TATACT-T2- |
| | 24nt for GEBx0308 |
| 721 | CD34-TATACT-T2- |
| | 25nt for GEBx0308 |
| 433 | HumanSpacer3 |
| | for Cas9 |
| 722 | CFTR-NGGAAAA-T1- |
| | 21nt for GEBx0305 |
| 723 | CFTR-NGGAAAA-T5- |
| | 21nt for GEBx0305 |
| 724 | EMX1-NGGAAAA-T5- |
| | 21nt for GEBx0305 |
| 725 | VEGFA-AAAAAA-T1- |
| | 21nt for GEBx0305 |
| 726 | EMX1-NGGTACT-T4- |
| | 21nt for GEBx0308 |
| 727 | POLQ-NGGTACT-T1- |
| | 21nt for GEBx0308 |
| 728 | POLQ-NGGTACT-T2- |
| | 21nt for GEBx0308 |
| 722 | CFTR-NGGAAAA- |
| | T1_21nt |
| 729 | CFTR-NGGAAAA- |
| | T2 21nt |
| 730 | CFTR-NGGAAAA- |
| | T4_21nt |
| 723 | CFTR-NGGAAAA- |
| | T5 21nt |
| 731 | EMX1-NGGAAAA- |
| | T1_21nt |
| 732 | EMX1-NGGAAAA- |
| | T2_21nt |
| 733 | EMX1-NGGAAAA- |
| | T3 21nt |
| 734 | EMX1-NGGAAAA- |
| | T4 21nt |
| 724 | EMX1-NGGAAAA- |
| | T5_21nt |
| 735 | POLQ-AAAAAA- |
| | T1 21nt |
| 736 | POLQ-AAAAAA- |
| | T2 21nt |
| 737 | POLQ-AAAAAA- |
| | T3_21nt |
| 738 | POLQ-AAAAAA- |
| | T4_21nt |
| 739 | POLQ-NGGAAAA- |
| | T1_21nt |
| 740 | POLQ-NGGAAAA- |
| | T2_21nt |
| 741 | POLQ-NGGAAAA- |
| | T3_21nt |
| 742 | POLQ-NGGAAAA- |
| | T4 21nt |
| 655 | RNF2-AAAAAA- |
| | T1 21nt |
| 743 | RNF2-AAAAAA- |
| | T2_21nt |
| 744 | RNF2-AAAAAA- |
| | T3_21nt |
| 658 | RNF2-AAAAAA- |
| | T4 21nt |
| 725 | VEGFA-AAAAAA- |
| | T1 21nt |
| 652 | VEGFA-AAAAAA- |
| | T2 21nt |
| 745 | VEGFA-AAAAAA- |
| | T3 21nt |
| 654 | VEGFA-AAAAAA- |
| | T4 21nt |
| 746 | POLQ-AAAAAA- |
| | T1 20nt |
| 747 | POLQ-AAAAAA- |
| | T2 20nt |
| 748 | POLQ-AAAAAA- |
| | T3 20nt |
| 749 | POLQ-AAAAAA- |
| | T4 20nt |
| 659 | CD34-CATACT- |
| | T1 21nt |
| 750 | CD34-NGGTACT- |
| | T1 21nt |
| 751 | CD34-NGGTACT- |
| | T2 21nt |
| 752 | CD34-NGGTACT- |
| | T3 21nt |
| 753 | CD34-NGGTACT- |
| | T4 21nt |
| 662 | CFTR-CATACT- |
| | T2_21nt |
| 754 | CFTR-CATACT- |
| | T3 21nt |
| 665 | CFTR-CATACT- |
| | T5 21nt |
| 755 | CFTR-NGGTACT- |
| | T1 21nt |
| 756 | CFTR-NGGTACT- |
| | T2 21nt |
| 757 | CFTR-NGGTACT- |
| | T3 21nt |
| 758 | CFTR-NGGTACT- |
| | T5 21nt |
| 759 | EMX1-NGGTACT- |
| | T1_21nt |
| 760 | EMX1-NGGTACT- |
| | T2 21nt |
| 761 | EMX1-NGGTACT- |
| | T3 21nt |
| 726 | EMX1-NGGTACT- |
| | T4_21nt |
| 762 | EMX1-NGGTACT- |
| | T5 21nt |
| 672 | POLQ-CATACT- |
| | T3 21nt |
| 674 | POLQ-CATACT- |
| | T5 21nt |
| 727 | POLQ-NGGTACT- |
| | T1_21nt |
| 728 | POLQ-NGGTACT- |
| | T2 21nt |
| 763 | POLQ-NGGTACT- |
| | T4 21nt |
| 764 | POLQ-NGGTACT- |
| | T5 21nt |
| 667 | RNF2-CATACT- |
| | T2 21nt |
| 668 | RNF2-CATACT- |
| | T3 21nt |
| 765 | CFTR-NGGCCT-T1 |
| 766 | CFTR-NGGCCT-T2 |
| 767 | CFTR-NGGCCT-T3 |
| 768 | CFTR-NGGCCT-T4 |
| 769 | CFTR-NGGCCT-T5 |
| 770 | EMX1-NGGCCT-T1 |
| 771 | EMX1-NGGCCT-T2 |
| 772 | EMX1-NGGCCT-T3 |
| 773 | EMX1-NGGCCT-T4 |
| 774 | EMX1-NGGCCT-T5 |
| 775 | POLQ-NGGCCT-T1 |
| 776 | POLQ-NGGCCT-T2 |
| 777 | POLQ-NGGCCT-T3 |
| 778 | POLQ-NGGCCT-T4 |
| 779 | POLQ-NGGCCT-T5 |
| 780 | POLQ-NGGCCT-T6 |
| 781 | POLQ-NGGCCT-T7 |
| 782 | TTR-NGGCCT-T1 |
| 783 | TTR-NGGCCT-T2 |
| 784 | TTR-NGGCCT-T3 |
| 785 | CFTR-NGGCCT-T5- |
| | 18 nt |
| 786 | CFTR-NGGCCT-T5- |
| | 19 nt |
| 787 | CFTR-NGGCCT-T5- |
| | 21 nt |
| 788 | CFTR-NGGCCT-T5- |
| | 22 nt |
| 789 | CFTR-NGGCCT-T5- |
| | 23 nt |
| 790 | CFTR-NGGCCT-T5- |
| | 24 nt |
| 791 | CFTR-NGGCCT-T5- |
| | 25 nt |
| 792 | TTR-NGGCCT-T1-18 nt |
| 793 | TTR-NGGCCT-T1-19 nt |
| 794 | TTR-NGGCCT-T1-21 nt |
| 795 | TTR-NGGCCT-T1-22 nt |
| 796 | TTR-NGGCCT-T1-23 nt |
| 797 | TTR-NGGCCT-T1-24 nt |
| 798 | TTR-NGGCCT-T1-25 nt |
| 799 | CFTR-NGGCCT-T1- |
| | 24 nt |
| 800 | CFTR-NGGCCT-T2- |
| | 24 nt |
| 801 | CFTR-NGGCCT-T3- |
| | 24 nt |
| 802 | CFTR-NGGCCT-T4- |
| | 24 nt |
| 803 | EMX1-NGGCCT-T1- |
| | 24 nt |
| 804 | EMX1-NGGCCT-T2- |
| | 24 nt |
| 805 | EMX1-NGGCCT-T3- |
| | 24 nt |
| 806 | EMX1-NGGCCT-T4- |
| | 24 nt |
| 807 | EMX1-NGGCCT-T5- |
| | 24 nt |
| 808 | POLQ-NGGCCT-T1- |
| | 24 nt |
| 809 | POLQ-NGGCCT-T2- |
| | 24 nt |
| 810 | POLQ-NGGCCT-T3- |
| | 24 nt |
| 811 | POLQ-NGGCCT-T4- |
| | 24 nt |
| 812 | POLQ-NGGCCT-T5- |
| | 24 nt |
| 813 | POLQ-NGGCCT-T6- |
| | 24 nt |
| 814 | POLQ-NGGCCT-T7- |
| | 24 nt |
| 815 | TTR-NGGCCT-T2-24nt |
| 816 | TTR-NGGCCT-T3-24nt |
| 817 | CFTR-NGGTACC-T1 |
| 818 | CFTR-NGGTACC-T2 |
| 819 | CFTR-NGGTACC-T3 |
| 820 | CFTR-NGGTACC-T4 |
| 821 | CFTR-NGGTACC-T5 |
| 822 | CFTR-NGGTACC-T6 |
| 823 | POLQ-NGGTACC-T1 |
| 824 | POLQ-NGGTACC-T2 |
| 825 | POLQ-NGGTACC-T3 |
| 826 | POLQ-NGGTACC-T4 |
| 827 | POLQ-NGGTACC-T5 |
| 828 | CFTR-TGTACC-T1 |
| 829 | CFTR-TGTACC-T3 |
| 830 | CFTR-TGTACC-T5 |
| 831 | CFTR-TGTACC-T6 |
| 832 | POLQ-TGTACC-T1 |
| 833 | POLQ-TGTACC-T3 |
| 834 | POLQ-TGTACC-T4 |
| 835 | POLQ-TGTACC-T6 |

[0286] FIG. 3 shows the indel levels of GEBx0305 across 16 targets with GGAAAA-PAM in HEK293T cell line. sgRNA sequence used for GEBx0305 in this experiment harbored GEBx0305-HPT-V1 scaffold (WT, SEQ ID NO. 465) with 20 nt spacer sequences (SEQ ID NOs: 571, 573, 575, 577, 579, 581, 583, 585, 587, 589, 591, 593, 595, 597, 599, and 601). And SpCas9 targeting the corresponding sites (SEQ ID NOs: 572, 574, 576, 578, 580, 582, 584, 586, 588, 590, 592, 594, 596, 598, 600, and 602) is applied as positive control. FIG. 4 shows the indel levels of GEBx0308 across 19 targets with GGTACT-PAM in HTEK293T cell line. sgRNA sequence used for GEBx0308 in this experiment harbored GEBx0308-PT-V1 scaffold (WT, SEQ ID NO: 451) with 20 nt spacer sequences (SEQ ID NOs: 611, 613, 615, 617, 619, 621, 623, 625, 627, 629, 631, 633, 635, 637, 639, 641, 643, 645, 647, and 649). SpCas9 targeting the corresponding sites (SEQ ID NOs: 612, 614, 616, 618, 620, 622, 624, 626, 628, 630, 632, 634, 636, 638, 640, 642, 644, 646, 648, and 650) is applied as positive control.

[0287] FIG. 5 shows the indel levels of GEBx0308 across 15 targets with CATACT-PAM in HEK293T cell line. psgRNA sequence used for GEBx0308 in this experiment harbored GEBx0308-Rq-V3 scaffold (M0, SEQ ID NO: 454) with 20 nt spacer sequences (SEQ ID NOs: 659-674).

[0288] FIG. 6 shows the indel levels of GEBx0328 across 20 targets with NNGCCT-PAM in HEK293T cell line. The sgRNA sequence used for GEBx0328 in this experiment harbored GEBx0328-PT-V1 scaffold (WT, SEQ ID NO: 491) with 20 nt spacer sequences (SEQ ID NOs: 765-784). GEBx0328 shows modest indel activity across 20 targets.

[0289] FIG. 7 and FIG. 8 shows the indel levels of GEBx0361 across 19 targets with GGTACC or TGTACC PAM in HEK293T cell line. sgRNA sequence used for GEBx0361 in this experiment harbored GEBx0361-HPT-V2 scaffold (SEQ ID NO: 548) with 20 nt spacer sequences (SEQ ID NOs: 817-835). GEBx0361 shows modest indel activity across 19 targets.

### Example 5: Optimization of the Exemplary CRISPR/Cas System

[0290] To further increase Cas protein editing efficiency, variable guide lengths and sgRNA scaffolds were tested. In a set of experiments, the HEK293T cells were cultured in DMEM media supplemented with 10% fetal bovine serum (Gibco™). For reverse transfection, the HEK293T cells were cultured in DMEM media supplemented with 10% fetal bovine serum (Gibco™). A volume of 250 μL of cells with a density of 50,000 cells/well was seeded onto a 48-well plate 24 hours pre-transfection. Cells were transfected with a lipoplex containing Lipofectamine™ 3000 (0.4 μL/well), P3000 (2 μL/well), pgRNA/pCas protein plasmid (125 ng/well and 375 ng/well, respectively) and Opti-Mem up to 25 μL/well per the manufacturer's protocol. Plated cells were allowed to settle and adhere for 72 hours in a tissue culture incubator at 37° C. and 5% CO₂ atmosphere. The nucleotide sequences of the pgRNA used in this example comprises sequences encoding the corresponding sgRNA scaffold (SEQ ID NO: 465 (GEBx0305), SEQ ID NO: 451 (GEBx0308), or SEQ ID NO: 491 (GEBx0328) and any one of the corresponding spacers (SEQ ID NOs: 575, 599, and 695-707 for GEBx0305; SEQ ID NOs: 625, 676, and 708-721 for GEBx0308 or SEQ ID NOs: 769, 782, and 785-798 for GEBx0328).

[0291] As shown in FIG. 9, indel levels vary depending on the length of the guide sequence of GEBx0305. sgRNA sequence used in this experiment harbored GEBx0305-HPT-V1 scaffold (WT, SEQ ID NO: 465) with CFTR-NGGAAAA-T3 or POLQ-NGGAAAA-T5 spacer sequences ranging from 18 nt to 25 nt (SEQ ID NOs: 575, 599, or 695-707). CFTR-NGGAAAA-T3-23 nt and POLQ-NGGAAAA-T5-25 nt spacer shows the highest indel in each group.

[0292] FIG. 10 (A and B) shows indel levels vary depending on the length of the guide sequence of GEBx0308. sgRNA sequence used in this experiment harbored GEBx0308-PT-V1 scaffold (WT, SEQ ID NO: 451) with CFTR-NGGTACT-T4 or CD34-TATACT-T2 spacer sequences ranging from 18 nt to 25 nt (SEQ ID NOs: 625, 676, or 708-721). CFTR-NGGTACT-T4-21 nt spacer shows the highest indel compared with other length spacers.

[0293] FIG. 11 (A and B) shows indel levels vary depending on the length of the guide sequence of GEBx0328. sgRNA sequence used in this experiment harbored GEBx0328-PT-V1 scaffold (WT, SEQ ID NO: 491) with TTR-NGGCCT-T1 or CFTR-NGGCCT-T5 spacer sequences ranging from 18 nt to 25 nt (SEQ ID NOs: 769, 782, or 785-798). TTR-NGGCCT-T1-24 nt and CFTR-NGGCCT-T5-24 nt spacer shows the highest indel in each group.

[0294] In another set of experiments, the HEK293T cells were cultured in DMEM media supplemented with 10% fetal bovine serum (Gibco™). For reverse transfection, the HEK293T cells were cultured in DMEM media supplemented with 10% fetal bovine serum (Gibco™). A volume of 100 μL of cells with a density of 25,000 cells/well was seeded onto a 96-well plate 24 hours pre-transfection. Cells were transfected with a lipoplex containing Lipofectamine™ 3000 (0.4 μL/well), P3000 (2 μL/well), pCas protein-gRNA plasmid (300 ng/well) and Opti-Mem up to L/well per the manufacturer's protocol. Plated cells were allowed to settle and adhere for 72 hours in a tissue culture incubator at 37° C. and 5% CO₂ atmosphere. The nucleotide sequences of the Cas protein-gRNA used in this example are composed of the Cas CDS, Cas sgRNA scaffold (Table 6) and the corresponding spacers (Table 7).

[0295] In another set of experiments, the HEK293T cells were cultured in DMEM media supplemented with 10% fetal bovine serum (Gibco™). For reverse transfection, the HEK293T cells were cultured in DMEM media supplemented with 10% fetal bovine serum (Gibco™). A volume of 100 μL of cells with a density of 25,000 cells/well was seeded onto a 96-well plate 24 hours pre-transfection. Cells were transfected with a lipoplex containing Lipofectamine™ 3000 (0.4 μL/well), P3000 (2 μL/well), pCas protein-gRNA plasmid (300 ng/well) and Opti-Mem up to L/well per the manufacturer's protocol. Plated cells were allowed to settle and adhere for 72 hours in a tissue culture incubator at 37° C. and 5% CO₂ atmosphere. The nucleotide sequences of the Cas protein-gRNA used in this example are composed of the Cas CDS, Cas sgRNA scaffold and the corresponding spacers.

[0296] FIG. 12 (A and B) shows indel levels of GEBx0305 targeting endogenous genes with modified RNAs scaffold. sgRNA sequence used in this experiment harbored GEBx0305-HPT-V1 (WT, SEQ ID NO: 465), GEBx0305-Rq-V2 (M0, SEQ ID NO: 466) or GEBx0305-M1 to M6 (SEQ ID NOs: 467-472) scaffold with 20 nt spacers targeting 8 endogenous gene sites (SEQ ID NOs: 575, 579, 585, 587, 589, 591, 599 and 601). GEBx0305-M5 and M6 scaffolds show the top 2 indel mean value.

[0297] FIG. 13 (A and B) shows indel levels of GEBx0308 targeting endogenous genes with modified RNAs scaffold. sgRNA sequence used in this experiment harbored GEBx0308-PT-V1 (WT, SEQ ID NO: 451), GEBx0308-Rq-V3 (M0, SEQ ID NO: 454) or GEBx0308-M1 to M6 (SEQ ID NOs: 455-460) scaffold with 20 nt spacers targeting 7 endogenous gene sites (SEQ ID NOs: 621, 625, 627, 631, 637, 639, and 641). GEBx0308-M3 and M4 scaffold show the top 2 indel mean value.

[0298] FIG. 14 (A and B) shows the of indel levels of GEBx0305 targeting endogenous genes under optimal conditions. Optimized sgRNA sequence used in this experiment harbored GEBx0305-M5 (SEQ ID NO: 471) scaffold with 21 nt spacers targeting 27 endogenous gene sites (SEQ ID NOs: 652, 654, 655, 658, 696, 703, 722-725, and 729-745). Compared with the WT sgRNA (GEBx0305-HPT-V1 scaffold (SEQ ID NO: 465) with 20 nt spacer (SEQ ID NOs: 571, 573, 575, 577, 579, 581, 583, 585, 587, 589, 591, 593, 595, 597, 599, 651-658, and 746-749), Optimized sgRNA significantly improved the indel levels (P<0.0001) of GEBx0305.

[0299] FIG. 15 (A and B) shows the of indel levels of GEBx0308 targeting endogenous genes under optimal conditions. Optimized sgRNA sequence used in this experiment harbored GEBx0308-M4 (SEQ ID NO: 458) scaffold with 21 nt spacers targeting 25 endogenous gene sites (SEQ ID NOs: 710, 659, 665, 667,668, 672, 674, 726, 727, 728, and 750-764). Compared with the WT sgRNA (GEBx0308-PT-V1 scaffold (SEQ ID NO: 451) with 20 nt spacer (SEQ ID NOs: 611, 613, 615, 617, 619, 621, 623, 625, 627, 629, 631, 633, 635, 637, 639, 641, 645, 647, 659, 662, 663, 665, 667, 668, 672, and 674)). Optimized sgRNA slightly improved the indel levels (P=0.03) of GEBx0308.

[0300] FIG. 16 (A and B) shows indel levels of GEBx0328 targeting endogenous genes with modified RNAs scaffold. sgRNA sequence used in this experiment harbored GEBx0328-PT-V1 (WT, SEQ ID NO: 491), GEBx0328-Rq-V1 (M0, SEQ ID NO: 492) or GEBx0328-M1 to M8 (SEQ ID NOs: 493-500) scaffold with 20 nt spacers targeting 8 endogenous gene sites (SEQ ID NOs: 765, 767, 769, 770, 771, 776, 782, and 783). GEBx0328-M6 scaffolds show the highest indel mean value.

[0301] FIG. 17 (A and B) shows the of indel levels of GEBx0328 targeting endogenous genes under optimal conditions. Optimized sgRNA sequence used in this experiment harbored GEBx0328-M6 (SEQ ID NO: 498) scaffold with 24 nt spacers targeting 19 endogenous gene sites (SEQ ID NOs: 790, 797, 799-807, and 809-816). Compared with the WT sgRNA (GEBx0328-PT-V1 scaffold with 20 nt spacer), Optimized sgRNA significantly improved the indel levels (P=0.0002) of GEBx0328.

### Example 6: In Vitro Gene Editing Using RNA

[0302] In set of experiments, the HEK293T was cultured in DMEM media supplemented with 10% fetal bovine serum (Gibco™). A volume of 100 μL of cells with a density of 25,000 cells/well were seeded in 96-well plates 24 hours pre-transfection. Cells were transfected with a lipoplex containing Lipofectamine™ RNAiMAX (Invitrogen™) and RNA (20 ng sgRNA, sgRNA: mRNA=1:1-1:8 w/w) and Opti-Mem up to 25 μL/well per the manufacturer's protocol. Plated cells were allowed to settle and adhere for 72 hours in a tissue culture incubator at 37° C. and 5% CO₂ atmosphere. The sgRNA and mRNA sequences are shown in Table 8. The mRNA used in this example is N1-methyl-pseudouridine modified of the uracil.

[0303] Primary human liver hepatocytes (PHH) cells were thawed and resuspended in hepatocyte thawing medium with supplements (Lonza, Cat. MCHT50) followed by centrifugation at 100 g for 10 minutes. The supernatant was discarded and the pelleted cells resuspended in hepatocyte plating medium (Lonza, Cat. MP100) plus 10% fetal bovine serum. Cells were counted and plated on Ultra Low Adsorption Cell Culture 96-well plates (Liver Biotech, Cat. LV-ULA002-96W) at a density of 40,000 cells/well. Plated cells were allowed to settle and adhere for 24 hours in a tissue culture incubator at 37° C. and 5% CO₂ atmosphere. After incubation cells were checked for monolayer formation and media was replaced with hepatocyte culture medium (Lonza, Cat. CC-3198) plus 10% fetal bovine serum. Cells were transfected with a lipoplex containing Lipofectamine™ RNAiMAX (Invitrogen™) and RNA (30 ng gRNA, gRNA:mRNA=1:1-1:16 w/w) and Opti-Mem up to 25 μL/well per the manufacturer's protocol. Plated cells were allowed to settle and adhere for 72 hours in a tissue culture incubator at 37° C. and 5% CO₂ atmosphere.

[0304] Method of genomic DNA extraction and NGS is identical to that described in Example 4.

[0305] FIG. 18 shows the indel levels of GEBx0305 targeting endogenous genes following transfection of HEK293T cell with lipoplex comprising a fixed amount (20 ng) of sgRNA targeting POLQ-NGGAAAA-T5 site (SEQ ID NO: 855) and different ratios of GEBx0305 mRNA (SEQ ID NO: 851). Equal doses SpCas9 mRNA and sgRNA (SEQ ID NOs: 853 and 854) were used as positive control. GEBx0305 shows an indel efficiency comparable to SpCas9.

[0306] FIG. 19 shows the indel levels of GEBx0308 targeting endogenous genes following transfection of HEK293T cell with lipoplex comprising a fixed amount (20 ng) of sgRNA targeting CFTR-NGGTACT-T4 or POLQ-NGGTACT-T1 site (SEQ ID NO: 856/857) and different ratios of GEBx0308 mRNA (SEQ ID NO: 852).

[0307] FIG. 20 shows the indel levels of GEBx0305 targeting endogenous genes following transfection of PHH cell with lipoplex comprising a fixed amount (20 ng) of sgRNA targeting POLQ-NGGAAAA-T5 site (SEQ ID NO: 855) and different ratios of GEBx0305 mRNA (SEQ ID NO: 851). Equal doses SpCas9 mRNA and sgRNA (SEQ ID NOs: 853, and 854, Table 9) were used as positive control.

[0308] FIG. 21 shows the indel levels of GEBx0308 targeting endogenous genes following transfection of PHH cell with lipoplex comprising a fixed amount (20 ng) of sgRNA targeting POLQ-NGGTACT-T1 site (SEQ ID NO: 857) and different ratios of GEBx0308 mRNA (SEQ ID NO: 852, Table 8).

TABLE 8
The exemplary mRNA and gRNA sequences for gene editing.

| SEQ ID | | |
|---|---|---|
| INOs | name | sequence |
| 851 | GEBx0305 | aGGCUUCCUUUUGUGCAGCUCUUGGGUUUUUUGUGGCUUCCUUCGUUAU |
| | | UGGAGCCAGGCCUACACCCCAGCAACCGCCACCAUGGCCCCCAAGAAGAA |
| | | GAGGAAGGUGGGGCAGAAGGACUUCUACCUCGGGCUGGACAUCGGGACG |
| | | GACAGCGUGGGGUACGCCGUGACGGACGAGCAGUACAACCUGCUCAAGU |
| | | UCUCCGGCGACGCCGCCUGGGGCGUCCACCUCUUCGACGAGGCGGAGCU |
| | | GUCCCAGGAGCGGCGGGCCUUCCGGGUGGCCCGCCGCCGGCUCGACCGGC |
| | | GGAAGCAGCGGGUCAUGCUGCUCCAGGAGCUCUUCGCCCCGGCCAUCCG |
| | | GGCCGUGGACGCCGACUUCUACAAGCGGCUCCAGGCCUCGGACCUCUUC |
| | | CGGGACGAGGCCGGGGACCGCUUCCCGAUCUUCAACGACGUGGACUACA |
| | | CGGACCGGGACUACUACAAGGCGUACCCCACGAUCCACCACCUCAUCUGC |
| | | GACCUCAUGGCGGACGAGACGGCCCACGAUGUCCGGCUCGUGUACCUGG |
| | | CCUGCGCCUGGCUGGUGUCCAACCGGGGGCACUUCCUGUCCAACCUGGA |
| | | CAAGGAGAACAUCUCGGCCCUGAAGAACUUCGACAAGGUGUACUCCGAG |
| | | UUCGAGCACUUCUUCACCGACAACGGGUACGCCUACCCGUGGGCCGAGG |
| | | CCGACCGGCGCACGAUCGGCGAGAUCCUCAAGAAGAAGACCACGGUGAC |
| | | GGCCAAGAACAAGGAGCUGACGCUCGCCUUCACCGGGGGCGGGAUGGCC |
| | | CCCAAGGAGGCGAGCGAGGACUUCCCGUUCGGCCAGCGGGCCAUCAUCA |
| | | AGCUGCUGGCCGGCGGGACGGCCCAGCUCAAGGAGCUCUUCGACCAGGA |
| | | GGCCUACGCCGAGUUCGGCGCGGUCUCCCUCAACUUCGACGACGACAAG |
| | | UUGGAGGAGAUCGCGGGCAACCUGGGCGACGACUUCGCCCUCAUCACCG |
| | | CCCUGCGGCAGGUCUUCGACUGGUCGGUGCUGGUCGAGGCCAUCGGGGA |
| | | CGCCGCCAGCAUCAGCGAGGCCAAGGUGGAGACCUACCGCCAGCACAAG |
| | | GCGGACCUGGCCAUCCUGAAGCGGAUCAUCAAGAACUACCGCCCCGAGA |
| | | AGUACGACGAGGUCUUCCGGGAGAUCGGGAAGGCCAACUACGCGGCCUA |
| | | CGCGUACCACUCCAACAAGAAGGCCGACGCCAAGUUCAAGAAGGUGGAC |
| | | CGCGAGGCCUUCUCGAAGUUCAUCACGGGCAUCGUGAAGGACAUCACGC |
| | | CCAAGGCGGAGGACGAGGAGAUCCUCGCCGACAUGCGGAACCGCCUCGA |
| | | CCUCCGCACCUUCCUGCCCAAGCAGAAGAACACCGACAACCGGGUGAUCC |
| | | CCCACCAGCUCUACCAGUACGAGCUGCACGAGAUCCUCAAGAACGCGGA |
| | | GGGGUACCUCCCGUUCUUGACGGAGAAGGACGAGUCCGGGCUGUCGGUG |
| | | UCCGACAAGAUCCGGAGCAUCUUCGCGUUCAAGAUCCCCUACUUCGUGG |
| | | GGCCCCUGAACGAGAAGAGCGACCACGCGUGGAUCGUCCGCAAGGCGGG |
| | | GAAGAUCUACCCGUGGAACUUCGAGGACAUCGUCGACCUGGACGCGUCC |
| | | GAGGAGGGGUUCAUCCGGCGGAUGACGAACCAGUGCACCUACCUGCCGG |
| | | GCGAGCCCGUCCUCCCGAAGGACAGCCUCCUGUACCACAAGUUCACCGU |
| | | GCUGAACGAGAUCAACAACCUCUCGAUCCACGGUGAGCGGAUCUCGGUG |
| | | GAGCUGAAGCAGCAGAUCUACUCGGAUCUGUUCCUGAACAAGAAGAAGG |
| | | UCACCCGGAAGCGGCUCCGGGAGUACCUGAUCGUGAACGGGGUCGUCGA |
| | | GAAGGACGACACCGACGCGAUCACGGGGAUCGACGAGGAGAUCAAGUCC |
| | | AACCUGCUGCCCCAGAUCUCGUUCCGGCGGCUGCUGGACGAGGGCACGC |
| | | UGUCGGAGGAGGACGUCGAGAAGAUCAUCGAGCGCUCGACGUUCUCCGA |
| | | CGACAAGACGCGCCUGAAGAAGUGGCUGGCGCGGGAGUACCCGCAGCUC |
| | | AACAGCAAGGACGUGGACUACAUCCGGUCCUUGCGGCUGCGGGACUUCG |
| | | GGCGCCUGUCGCAGGCCUUCCUGGAGGGCAUCAUCGCGGCCGACCGGAG |
| | | CACCGGGGAGGCCUUCACCAUCAUCAGCGCGCUCUGGAACACCCAGAAG |
| | | AACCUGAUGGAGCUGCUCUCGGACCAGUUCACCUUCGCCGAGACGAUCG |
| | | AGCGCUUCCGGGAGGACUACUACCGGGAGCACCCGGUGAGCCUCUCGGA |
| | | GCGCAUGGACGAGAUGUACUUGUCCAACUCGGUGAAGCGGAGCGUCUUC |
| | | CGGACGCUCGACAUCGUGAAGGAUGUCAAGAAGGCCUUCGGGGCCCCGA |
| | | AGAAGAUCUUCGUGGAGGUCACCCGGGGCGGGUCGCCCGACCAGAAGGG |
| | | CAAGCGGACCAAGUCCCGGAGCCAGCAGCUGCGGGAGCUGUACGACAAG |
| | | UGCCGGGACGAGGACCUCCCGCUGCUGAAGCAGCAGCUGGAGGCCAUGG |
| | | GGGACGCGGCGGACAGCAAGCUGCAGUCCGAGAAGCUGUUCCUCUACUA |
| | | CCUCCAGCUGGGGAAGUCCGCGUACUCCGACAAGCGGAUCCCGCUGGAG |
| | | GCCCUGGCCUCCAAGGCCUACGACAUCGACCACAUCUACCCGCAGGCCUU |
| | | CGUGAAGGACGACUCCAUCAUCAACAACAAGGUCCUCGUCCUGAGCGAG |
| | | GAGAACGGGGCGAAGAGCAACAACUACCCCAUCCAGGGGUCCAUCCGGC |
| | | ACCACAUGCAGGGCUUCUGGAGCUACCUCCAGGAGGUGGGCCUGAUGUC |
| | | CAAGGAGAAGUACAAGCGCCUCACCCGGAGCACCCCGUUCACGGAGGAG |
| | | GAGCGGUACGGCUUCAUCAACCGCCAGCUGACGAGCACGUCGCAGUCGA |
| | | CGAAGGCGGUGGCCACGCUCCUCAAGGAGCACCUGCCCGAGACCGAGAU |
| | | CGUCUACUGCAAGGCGCGGCUCGUCACGGACUUCCGGCAGGCCUUCGAC |
| | | CUGUUCAAGUCGCGGCAGUACAACGACCUGCACCACGCGGUCGACGCCU |
| | | ACCUGAACAUCGUGACGGGCAACGUGUACAACAUGCGGUUCACCAAGAA |
| | | CUUCAACGUGCACUCGCAGUACUCGAUCAAGACCGAGACGGUCUUCACG |
| | | CGGCCCGUGACGUACAAGUCCCAGACCAUCUGGGACGGCAUCGACAUGC |
| | | UGGCCAAGGUGAAGUCCAUCGCCAACAAGAACACCGCCCACAUCACGAA |
| | | GUACGCGUUCAUGAAGAAGGGCGGGUUCUUCGACCAGCUGCCCGUCCGG |
| | | GCGGCGGACGGGCUCAUCCCCCGGAAGAAGCACCUGCCCACGCAGAAGU |
| | | ACGGCGGGUACAACAAGCCGGGGGUGAUGUUCUUCAUCCCCGUGAAGUA |
| | | CCAGCUGGGGAAGAAGAGCGAGCUGUUCAUCCUCCCCGUGGAGCUGCUC |
| | | UGCGGGAAGCGGUUCCUGGCGGACCCGGAGUUCGCCCAGGCCUACGCCG |
| | | UGAAGCGGCUCGAGCGGAUCCUCAAGAAGCCGGUCGACCAGAUCAGCUU |
| | | CCCGCUCGGCAUGCGGCCCUGGAAGGUCAACACCGUCCUGGCCCUGGAC |
| | | GGCUUCAAGUACUGCAUCACGGGGUCGUCCAACGGGGGCACCCGGCUGA |
| | | UCCUCCAGCCGAUGAUGUCCUUCAGCUCCGCGCCCUACUGGGCGUUCUA |
| | | CCUGAAGAAGCUGGAGGUGUUCGUGGAGAAGAACGCGAACAACCCCCAG |
| | | CACGUCUACGACGAGGCGUACGACAAGGUCAACUGCGAGGACAACCUCA |
| | | AGCUGUACGACCUGUACUGCCAGAAGCUGACGAGCACGAUCUACAGCAA |
| | | GCGGAUCAACAGCCCGCUGGACAUCCUGCUCCAGGGGGGGGAGAAGUUC |
| | | AGCGGGCUGGACAUCAAGCAGCAGGCCCAGGCCCUGCUGAACAUCCACC |
| | | AGGUGUUCGGCAGGAUCGCCGGGGGCUGCGACUUGACGCUCGUCGGCGG |
| | | CAAGAAGGGGUCGGCGGCGACCAGCGCCUCGUCGGCGAUCUCCAACCUG |
| | | GGGAAGCGGUACCAGGACGUGCGGGUCUGGGACACCAGCCCGUCGGGGC |
| | | UCUGGUCCAAGCGGAGCCCCAACCUCCUGGACCUGCUCAAGAGACCCGCC |
| | | GCCACCAAGAAGGCCGGCCAGGCCAAGAAGAAGAAGGACUACAAGGACG |
| | | ACGACGACAAGUGAUCUUCACCCAGUCUGUCUCUUAGAAUUUAUUUCCC |
| | | ACUGACACAAACAAGCCAUUUUGUCUGCUUGUAUAACCCGGAUCCUCAG |
| | | GAAAAAAAAAAAAAAAAAAAAAAAAAAAAAAAAAAAAAAAAAAAAAAA |
| | | AAAAAAAAAAAAAAUGCAUAAAAAAAAAAAAAAAAAAAAAAAAAAAAA |
| | | AAAAAAAAAAAAAAAAAAAAAAAAAAAAAAA |
| 852 | GEBx0308 | aGGCUUCCUUUUGUGCAGCUCUUGGGUUUUUUGUGGCUUCCUUCGUUAU |
| | | UGGAGCCAGGCCUACACCCCAGCAACCGCCACCAUGGCCCCCAAGAAGAA |
| | | GAGGAAGGUGAAGCAGAAGUACUACCUCGGGCUGGACAUGGGGACGUCC |
| | | AGCCUGGGGUGGGCCGUGACCAACGAGAAGUACUCGCUGCUCCGGAAGA |
| | | AGGGGAAGGACCUCUGGGGCGUGCGGCUCUUCGAGGAGGCGAAGACGGC |
| | | CGCCGACCGGCGGUCCUACCGGACCGCCCGGCGGCGGCUGCAGCGGGAG |
| | | AAGGCCCGCAUCGGGUACCUCCGGGAGCUCUUCUCGGAGGAGAUCAACA |
| | | AGAUCGACGCGGGCUUCUUCCAGCGGCUGGAGGACUCCAAGUACCACAA |
| | | GGAGGACAAGCGGGAGCACCAGCCCUUCGCCCUCUUCGCCGACAAGGGC |
| | | UACACGGACCGCGAGUACUUCGAGGACUACCCCACGAUCUUCCACCUGC |
| | | GGAAGGCGCUGCUGGACAUCGAGAACGAGGGGAAGACCUUCGAUGUCCG |
| | | GCUGGUCUACCUGGCCAUCCUGAACAUGUUCAAGCACCGGGGGCACUUC |
| | | CUCAACGCCAACCUGGACGACAAGUCCGGGGGCGACCUCAAGGAGAAGA |
| | | UCCACAUCCUGACGUCCAUGGCGAACAAGCUGUUCGACGACAUCAGCUU |
| | | CAAGACCGUGGACAUCAAGGACAUCGAGCAGAUCCUGGCCAGCAAGGAC |
| | | UACUCGAACUCGACGCGGCUCGAGAAGCUGCUCGAGCUGUUCGAGCUGU |
| | | CGAAGACCAAGAACAAGGUCGAGACGGAGAUCUUCAAGAUGAUCUGCGG |
| | | CCUGAAGGGGACCAUCUCGAAGAUCUUCGCGAACGAGAGCAUGGACGAG |
| | | GAGGCCCAGAAGCUCUCGUUCUCGUUCCGGGACGGGAACUACGACGAGA |
| | | AGAUCGUCGAGAUGGAGGAGGCGCUCUCGGAGGAGUCCUACGAGUUCAU |
| | | CAUGAUCAUGAAGCAGGUCCACGACUGGGCCGUGCUCAGCAACAUCAUG |
| | | AUGGGCGAGGAGUACCUCUCGGUGGCGCGGGUCAAGGCCUACGAGAAGC |
| | | ACAAGAAGGACCUGAACAUGCUCAAGGCCCUGCUCAAGAACUACUCCAU |
| | | CAAGGAGUACAACUCCAUGUUCCGGAUCAUGAAGGACAACAACUACUCG |
| | | UCCUACAUCGGGAGCGUGAUCUCCCAGGAGACGAUCCGGCGCAAGGGGA |
| | | AGUACACGACGGACGACUUCUACAAGAACGUGAAGUCGAUCGUCCUCAA |
| | | GUGCGAGGAGUGCACCGAGAAGGAGUACAUCCUCAGCGAGAUCGAGAAG |
| | | AAGACGUUCCUGCCCAAGCAGAACACGACGUCGAACUCGGUCAUCCCGA |
| | | ACCAGGUCCACAAGAAGGAGCUGAAGCGGAUCCUCGAGAACGCGGCCAA |
| | | GUACCUCGAGUUCCUGAACGACAAGGACGACACGGGGCUCACCGUGUCG |
| | | GAGAAGAUCGUGCGGCUCUUCGAGUUCCAGAUCCCGUACUACGUGGGGC |
| | | CGCUGAGCAACGGCGUCUGCGACGGGAAGAACGUCUGGUCCGUCCGGCG |
| | | CGAGAAGGGCGCCGUGCUGCCGUGGAACUUCGAGGAGAAGAUCGACGUG |
| | | AAGCAGAGCAGCGAGAACUUCAUCACCAAGCUGGUGAACCACUGCACCU |
| | | ACCUCAACGGGGAGACCGUCCUCCCCAAGAACUCGCUGCUCUACGAGAA |
| | | GUUCAUGGUCCUGAACGAGCUGAACAACCUGAAGAUCAACGGGGUGAAG |
| | | AUCGGGGUGGAGCUCAAGCAGAGCAUCUACAACGACGUCUUCAAGAAGG |
| | | GGAAGAAGGUCACGGCCAAGGCCCUGAUCCAGUACCUGAAGAACAUCGG |
| | | GGAGAUCGACGCCACCGAGGAGACGGUGGUGUCGGGGAUCGACGGGGAC |
| | | UUCACGAACCGGCUCGCGAACUACAAGAAGUUCAUCGAGAUCUUCAAGG |
| | | UCCCCACGCUCACCUACGAGCAGGAGCAGAUCGCCGAGGACAUCAUCUU |
| | | CUACUCCACCGUGUACGGGGAGUCGAAGAAGUUCCUCGAGGAGCGGAUC |
| | | AGGGAGAAGUACAACGAGGAGCUGUCGGAGAACCAGAUCAAGCGGAUCC |
| | | UCGGCCUCAAGUUCAAGGACUGGGGCCGGCUCUCGAAGGAGCUGCUGCU |
| | | GCUGCAGGGGAUCGACAAGCAGACCGGCGAGAUCUCCAGCAUCAUCAGC |
| | | AAGAUGUGGUCGGACAACUACAACCUGAUGGAGCUGAUCGCCACCGACA |
| | | AGUUCUCGUACGGGUACAACAUCGAGCAGAAGACCUCGAAGAUCGAGAA |
| | | GGUCCUGUCCGACAUCGAGUACAGCGACCUCGACGAGAUCUACAUCUCG |
| | | GCCCCGGUCAAGCGGAUGGUCUGGCAGACCAUCCUCGUGCUGAAGGAGC |
| | | UCGAGAAGGUCAUGGGCUGCGAGCCCGAGAAGAUCUUCGUCGAGAUGGC |
| | | GCGGGACGCCAACGCGCCGAAGAAGCGGACGGAGUCCCGCAAGAAGAAG |
| | | UUCCUCGAGCUCUACAAGACCUGCAAGAAGGAGUCCCGGGACUGGAAGG |
| | | AGGAGCUCGAGGACACCGAGGAGAGCAAGUUCCGGUCCAAGAAGCUGUA |
| | | CCUGUACUACACCCAGAAGGGGCGGUGCAUGUACAGCGGGGAGGAGAUC |
| | | GAGCUGAAGGAUCUCUUCAACGACAACCUGUACGACAUCGACCACAUCU |
| | | ACCCGCGGCACUUCGUGAAGGACGACAGCAUCGAGAACAACCUCGUGCU |
| | | GGUCCGGAAGGUGGACAACGCCCACAAGUCGGACGCCGUGCUGGAGUCG |
| | | UCGAUCCGCAACAAGAUGUGCGGCUUCUGGAAGAUCCUCCGGGAGGGGA |
| | | GCUUCAUCACCGACGAGAAGUACAAGCGCCUCAUGCGGACCGACGACUU |
| | | CAGCGACGAGGAGCGGGCCGGCUUCAUCAGCCGGCAGAUCGUGGAGACG |
| | | CGGCAGGGGACCAAGGUCAUCGCCGACCUCUUCACGAAGACGUUCCCCG |
| | | AGAGCGAGAUCAUCUACGUGAAGGCGGGGAACGUCUCGGACUUCCGGAA |
| | | GAAGUUCGACUUCCUGAAGUGCCGCAUCGUGAACGACUUCCACCACGCG |
| | | CAGGACGCGUACCUGAACAUCGUGGUGGGGAACGUGUACAACACGAAGU |
| | | UCACGCAGAACCCGAUGAACUUCAUCCGGGAGUACAACAAGGACCCCAA |
| | | GGCCAACAAGUACCACAUGGACAAGCUCUUCGAGUACCCGGUGUCCCGG |
| | | AACGGCCGGGACGCCUGGGUGACGAAGAACGCGGAGUCCAUCUGCAUGG |
| | | UCAAGAAGAUGAUGGAGAAGAACACGCCGCUCAUCACGCGGAUGAACUA |
| | | CGAGAGCCACGGCGGGAUCGCCGACCAGACGAUCUACUCCGCCGAGGAC |
| | | GCCCAGAAGGCCAAGGGCAAGGGGUACAUCAGCAUCAAGUCCUCCGACG |
| | | GCAACCUCCUCGACACCUGCAAGUACGGCGGGAUGAAGAAGUACACCGG |
| | | CACGUACUUCCUCCUGCUGGAGCACACCAAGAAGGAGAAGCGGAUCCGG |
| | | ACCAUCGAGGCCAUGCCGCUCUACCUGAAGGACAAGCUCAACACGCGGG |
| | | AGAAGAUCGAGAAGUACUUCGAGCAGUCCGUGGACUUCGCCUACGAGCA |
| | | GCCGAAGGUGAUCCUGGACAAGAUCAAGAUGUACUCCCUGAUCAAGGUG |
| | | GACGGGUUCUACCUCUACCUGACGGGGCGGACGGGGAACCAGCUCUCCG |
| | | UCUGCAACGCGGUGCAGAUGAGCCUGUCCGCCGGGAUGGUGAAGUACGU |
| | | CCGGAAGAUCUCGAUCGCCAACGAGCGGUACGCCGCCGACAAGGAGUUC |
| | | GAGAAGGACGAGAACAUCUCCGUCCAGAAGAACCUCGAGCUCUACGAGA |
| | | UCCUGAAGGAGAAGCACCUCAACCAGAUCUACGGCAAGCGGCCGAACCC |
| | | CGUCGGCGAGAAGAUCGAGAAGGGGAUCGAGAAGUUCCGGAGCCUCAGC |
| | | GUCCGGAAGCAGAUCUACGUGCUGCUGCAGAUCCUGCAGCUGUCCCAGC |
| | | UGAGCAACCAGGGGGCCGACCUCCUGGAGAUCGGCGGGGAGAAGAAGAC |
| | | CGGGACGUCGAAGCUCAACAAGAACAUCACGGAGAAGCAGGAGUUCAAG |
| | | CUCAUCAACCAGUCCGUGACGGGGCUCUACGAGAACGAGAUCGACCUGC |
| | | UCCGGAUCAAGAGACCCGCCGCCACCAAGAAGGCCGGCCAGGCCAAGAA |
| | | GAAGAAGGACUACAAGGACGACGACGACAAGUGAUCUUCACCCAGUCUG |
| | | UCUCUUAGAAUUUAUUUCCCACUGACACAAACAAGCCAUUUUGUCUGCU |
| | | UGUAUAACCCGGAUCCUCAGGAAAAAAAAAAAAAAAAAAAAAAAAAAA |
| | | AAAAAAAAAAAAAAAAAAAAAAAAAAAAAAAAAAUGCAUAAAAAAAAA |
| | | AAAAAAAAAAAAAAAAAAAAAAAAAAAAAAAAAAAAAAAAAAAAAAAA |
| | | AAA |
| 853 | SpCas9 | AGGUCUAGAGGGAAAUAAGAGAGAAAAGAAGAGUAAGAAGAAAUAUAA |
| | mRNA | GACCCCGGCGCCGCCACCAUGGCCCCUAAGAAAAAGCGGAAGGUGGACA |
| | | AGAAGUACAGCAUCGGCCUGGACAUCGGCACCAAUUCUGUUGGCUGGGC |
| | | CGUGAUCACCGACGAGUACAAGGUGCCCAGCAAGAAAUUCAAGGUGCUG |
| | | GGCAACACCGACCGGCACAGCAUCAAGAAGAAUCUGAUCGGCGCCCUGC |
| | | UGUUCGAUUCUGGCGAAACAGCCGAGGCCACCAGACUGAAGAGAACCGC |
| | | CAGAAGAAGAUACACCCGGCGGAAGAACCGGAUCUGCUACCUGCAAGAG |
| | | AUCUUCAGCAACGAGAUGGCCAAGGUGGACGACAGCUUCUUCCACAGAC |
| | | UGGAAGAGUCCUUCCUGGUGGAAGAGGAUAAGAAGCACGAGCGGCACCC |
| | | CAUCUUCGGCAACAUUGUGGAUGAGGUGGCCUACCACGAGAAGUACCCC |
| | | ACCAUCUACCACCUGAGAAAGAAACUGGUGGACAGCACCGACAAGGCCG |
| | | ACCUGAGACUGAUCUAUCUGGCCCUGGCUCACAUGAUCAAGUUCCGGGG |
| | | CCACUUCCUGAUCGAGGGCGACCUGAAUCCUGACAACAGCGACGUGGAC |
| | | AAGCUGUUCAUCCAGCUGGUGCAGACCUACAACCAGCUGUUCGAGGAAA |
| | | ACCCCAUCAACGCCAGCGGAGUGGAUGCCAAAGCCAUCCUGUCUGCCAG |
| | | ACUGAGCAAGAGCAGACGGCUGGAAAACCUGAUUGCCCAGCUGCCUGGC |
| | | GAGAAGAAGAACGGCCUGUUUGGCAACCUGAUCGCCCUGUCUCUGGGCC |
| | | UGACACCUAACUUCAAGAGCAACUUCGACCUGGCCGAGGACGCCAAACU |
| | | GCAGCUGAGCAAGGACACCUACGACGACGACCUGGAUAACCUGCUGGCC |
| | | CAGAUCGGCGAUCAGUACGCUGAUCUGUUCCUGGCCGCCAAGAACCUGU |
| | | CUGAUGCCAUCCUGCUGAGCGACAUCCUGAGAGUGAACACCGAGAUCAC |
| | | AAAGGCCCCUCUGAGCGCCUCUAUGAUCAAGAGAUACGACGAGCACCAC |
| | | CAGGAUCUGACCCUGCUGAAAGCCCUCGUUAGACAGCAGCUGCCAGAGA |
| | | AGUACAAAGAGAUUUUCUUCGACCAGAGCAAGAACGGCUACGCCGGCUA |
| | | UAUUGAUGGCGGAGCCAGCCAAGAAGAGUUCUACAAGUUCAUCAAGCCC |
| | | AUCCUCGAGAAGAUGGACGGCACCGAGGAACUGCUGGUCAAGCUGAACA |
| | | GAGAGGACCUGCUGCGGAAGCAGAGAACCUUCGACAAUGGCAGCAUCCC |
| | | UCACCAGAUCCACCUGGGAGAACUGCACGCCAUUCUGCGGAGACAAGAG |
| | | GACUUCUACCCAUUCCUGAAGGACAACCGGGAAAAGAUUGAGAAGAUCC |
| | | UGACCUUCAGAAUCCCCUACUACGUGGGACCCCUGGCCAGAGGCAAUAG |
| | | CAGAUUUGCCUGGAUGACCCGGAAGUCCGAGGAAACCAUCACACCCUGG |
| | | AACUUCGAGGAAGUGGUGGAUAAGGGCGCCAGCGCUCAGUCCUUCAUCG |
| | | AGCGGAUGACCAACUUCGAUAAGAACCUGCCUAACGAGAAGGUGCUGCC |
| | | CAAGCACAGCCUGCUGUACGAGUACUUCACCGUGUACAACGAGCUGACC |
| | | AAAGUGAAAUACGUGACCGAGGGAAUGAGAAAGCCCGCCUUUCUGAGCG |
| | | GCGAGCAGAAAAAGGCUAUCGUGGAUCUGCUGUUCAAGACCAACCGGAA |
| | | AGUGACCGUGAAGCAGCUGAAAGAGGACUACUUCAAGAAAAUCGAGUGC |
| | | UUCGACAGCGUGGAAAUCAGCGGCGUGGAAGAUCGGUUUAAUGCCAGCC |
| | | UGGGCACAUACCACGAUCUGCUCAAGAUUAUCAAGGACAAGGACUUCCU |
| | | GGACAACGAAGAGAACGAGGACAUCCUGGAAGAUAUCGUGCUGACCCUG |
| | | ACACUGUUUGAGGACAGAGAGAUGAUCGAGGAACGGCUGAAAACAUACG |
| | | CCCACCUGUUCGACGACAAAGUGAUGAAGCAACUGAAGCGGCGGAGAUA |
| | | CACAGGCUGGGGCAGACUGUCCAGAAAGCUGAUCAACGGCAUCCGGGAC |
| | | AAGCAGUCCGGCAAGACCAUCCUGGACUUUCUGAAGUCCGACGGCUUCG |
| | | CCAAUCGGAACUUCAUGCAGCUGAUUCACGACGACAGCCUCACCUUCAA |
| | | AGAGGAUAUCCAGAAGGCCCAGGUUUCCGGCCAGGGCGAUUCUCUGCAC |
| | | GAGCACAUUGCCAAUCUGGCCGGCUCUCCUGCCAUUAAGAAGGGCAUCC |
| | | UGCAGACAGUGAAGGUGGUGGACGAACUCGUGAAAGUGAUGGGCAGAC |
| | | ACAAGCCCGAGAACAUCGUGAUCGAAAUGGCCAGAGAGAACCAGACCAC |
| | | ACAGAAGGGCCAGAAAAACAGCCGCGAGAGAAUGAAGCGGAUCGAAGAG |
| | | GGCAUCAAAGAGCUGGGCAGCCAGAUCCUGAAAGAACACCCCGUGGAAA |
| | | ACACCCAGCUGCAGAACGAGAAGCUGUACCUGUACUACCUGCAGAAUGG |
| | | ACGGGAUAUGUACGUGGACCAAGAGCUGGACAUCAACCGGCUGUCCGAC |
| | | UACGAUGUGGACCAUAUCGUGCCCCAGUCUUUUCUGAAGGACGACUCCA |
| | | UCGACAACAAGGUCCUGACCAGAAGCGACAAGAACCGGGGCAAGAGCGA |
| | | UAACGUGCCAAGCGAAGAGGUCGUGAAGAAGAUGAAGAACUACUGGCGA |
| | | CAGCUGCUGAACGCCAAGCUGAUUACCCAGCGGAAGUUCGACAACCUGA |
| | | CCAAGGCAGAGAGAGGCGGCCUGUCUGAACUGGAUAAGGCCGGCUUCAU |
| | | CAAGAGACAGCUGGUGGAAACCCGGCAGAUCACCAAGCACGUGGCACAG |
| | | AUUCUGGACUCCCGGAUGAACACUAAGUACGACGAGAACGACAAACUGA |
| | | UCCGGGAAGUGAAAGUCAUCACCCUGAAGUCCAAGCUGGUGUCCGAUUU |
| | | CCGGAAGGAUUUCCAGUUUUACAAAGUGCGCGAGAUCAACAACUACCAU |
| | | CACGCCCACGACGCCUACCUGAAUGCCGUUGUGGGAACAGCCCUGAUCA |
| | | AGAAGUAUCCCAAGCUGGAAAGCGAGUUCGUGUACGGCGACUACAAGGU |
| | | GUACGACGUGCGGAAGAUGAUCGCCAAGAGCGAACAAGAGAUCGGCAAG |
| | | GCCACCGCCAAGUACUUUUUCUACAGCAACAUCAUGAACUUUUUCAAGA |
| | | CCGAGAUUACCCUGGCCAACGGCGAGAUCAGAAAGCGGCCUCUGAUCGA |
| | | GACAAACGGCGAAACCGGCGAGAUUGUGUGGGACAAGGGCAGAGAUUUC |
| | | GCCACCGUGCGGAAAGUGCUGAGCAUGCCCCAAGUGAAUAUCGUGAAAA |
| | | AGACCGAGGUGCAGACAGGCGGCUUCUCCAAAGAGAGCAUCCUGCCUAA |
| | | GCGGAACAGCGACAAGCUGAUCGCCAGAAAGAAGGACUGGGACCCUAAG |
| | | AAGUACGGCGGCUUCGAUAGCCCUACAGUGGCCUAUUCUGUGCUGGUGG |
| | | UGGCCAAAGUGGAAAAGGGCAAGUCCAAGAAGCUCAAGAGCGUCAAAGA |
| | | ACUGCUCGGCAUCACCAUCAUGGAACGGUCCAGCUUCGAGAAGAAUCCC |
| | | AUCGACUUUCUGGAAGCCAAGGGCUACAAAGAAGUCAAGAAGGACCUGA |
| | | UCAUCAAGCUCCCCAAGUACUCCCUGUUCGAGCUGGAAAAUGGCCGGAA |
| | | GAGAAUGCUGGCCUCUGCCGGCGAACUGCAGAAAGGCAAUGAACUGGCC |
| | | CUGCCUAGCAAAUACGUCAACUUCCUGUACCUGGCCAGCCACUAUGAGA |
| | | AGCUGAAGGGCAGCCCCGAGGACAAUGAGCAGAAACAACUGUUCGUGGA |
| | | ACAGCACAAACACUACCUGGACGAGAUCAUCGAGCAGAUCUCCGAGUUC |
| | | AGCAAGAGAGUGAUCCUGGCCGACGCCAACCUGGACAAAGUGCUGUCUG |
| | | CCUACAACAAGCACCGGGAUAAGCCCAUCAGAGAGCAGGCCGAGAAUAU |
| | | CAUCCACCUCUUCACCCUGACCAACCUGGGAGCCCCUGCCGCCUUUAAGU |
| | | ACUUCGACACCACCAUCGACCGGAAGCGGUACACCUCUACCAAAGAGGU |
| | | GCUGGACGCCACACUGAUCCACCAGAGCAUCACCGGCCUGUACGAGACA |
| | | AGAAUCGAUCUGUCCCAGCUCGGCGGCGACAAAAGACCUGCCGCAACAA |
| | | AGAAAGCCGGACAGGCCAAGAAAAAGAAGUGAUAAUAGCGGCCGCGGCC |
| | | CGAUCCAGUGGGCAGGCCAAGGCCUGCUGGGCCCCCGCGGACCCAGGUG |
| | | CUCUGGGUCACGGUCCCUGUCCCCGCGCCCCCGCUUCUGUCUGCCCCAUU |
| | | GUGGCUCCUCAGGCUCUCUCCCCUGCUCUCCCACCUCUACCUCCACCCCC |
| | | ACGGAUCCUCAGGAAAAAAAAAAAAAAAAAAAAAAAAAAAAAAAAAAA |
| | | AAAAAAAAAAAAAAAAAAAAAAAAAAUGCAUAAAAAAAAAAAAAAAAA |
| | | AAAAAAAAAAAAAAAAAAAAAAAAAAAAAAAAAAAAAAAAAAA |
| 854 | SpCas9- | mA*mU*mC*AGCCGGGAGGGUUAGCAGUUUUAGAGCUAGAAAUAGCAAG |
| | POLQ- | UUAAAAUAAGGCUAGUCCGUUAUCAACUUGAAAAAGUGGCACCGAGUCG |
| | NGGAA | GUGCU*mU*mU*mU |
| | AA-T5- | |
| | MS | |
| 855 | GEBx030 | mU*mC*mA*GCCGGGAGGGUUAGCAUGUUUGAGAGUAAUGUAAUGAAAA |
| | 5-POLQ- | UUACGUUACGCGUUCAAAUAAAGGUAAACCCAAAUCGUUGGCUUGACCA |
| | NGGAA | ACUGCACAGUGUGUGCGUUCAGGACUGCUUCAGUGCAGUCCU*mU*mU* |
| | AA-T5- | mU |
| | MS | |
| 856 | GEBx030 | mU*mC*mA*CUGCAAGGCACUCUCUAGUUUGAGAACCUUGUGAAAACAA |
| | 8-CFTR- NGGTAC | GUGUGGAUA*mA*mA*mU |
| | T-T4-MS | GGUGAGUUCAAAUAAGGAUUUAUCCGAAAUCGCCGAAAUGGCCCACAUU |
| 857 | GEBx030 | GUGUGGAUA*mA*mA*mU |
| | 8-POLQ- NGGTAC | A*mG*mG*mGUCUGUAAGGAGUACUGGUUUGAGAACCUUGUGAAAACAA |
| | T-T1-MS | GGUGAGUUCAAAUAAGGAUUUAUCCGAAAUCGCCGAAAUGGCCCACAUU |

### Example 7. Off-Target Profiling in Cell Lines Using GUIDE-Seq

[0309] GUIDE-Seq leverages a dsODN to insert into the double-strand break site generated by CRISPR/Cas. The HEK293T was cultured in advanced DMVEM media supplemented with 500 fetal bovine serum (Gibco™). Cells were seeded at a density of 100,000 cells/well in 24-well plate 24 hours prior to transfection. Cells were transfected with 400 ng of pCas protein plasmid, 150 ng of pgRNA plasmid, and 2.5 pmol of dsODN using Lipofectamine 3000 (Invitrogen™) per the manufacturer's protocol, cultured at 37° C. and 5% CO₂, and harvested on day three post-transfection.

[0310] For GUIDE-Seq library construction, an amount of 500 ng genomic DNA was used for GUIDE-Seq library construction. Briefly, DNA was fragmented by KAPA Frag Kit (KAPA Biosystems), followed by adaptor ligation and two rounds of hemi-nested PCR enrichment for dsODN-integrated fragments. Final sequencing libraries were quantified by KAPA Library Quantification Kits and sequenced on an Illumina NextSeq 1000 System. Data demultiplexing of Index 1 was performed by bcl2fq (version 2.19), followed by custom scripts for Index 2 demultiplexing, adaptor trimming using the BBduk tool, and analyzed by the GUIDE-seq software. Briefly, unique molecular index (UMI)-tagged FASTQ file was consolidated to generate UMI-consensus sequence, and aligned to human reference genome (hg19) using BWA MEM. High-quality alignments (MAPQ≥50) were used for identifying genomic loci harboring the dsODN as the potential off-target sites. Candidate loci with up to 6 mismatches against the corresponding on-target protospacer were identified as bona fide off-target sites.

[0311] FIG. 22 shows the summary of top Guide-seq insertion sites of GEBx0305. No detectable off-targets could be detected at site 1 (CFTR-NGGAAAA-T5) and site 2 (EMX1-NGGAAAA-T5).

[0312] FIG. 23 shows the summary of top Guide-seq insertion sites of GEBx0308. no off-targets could be detected at site 1 (CD34-NGGTACT-T4) and site 2 (POLQ-NGGTACT-T1).

[0313] FIG. 24 shows the summary of top Guide-seq insertion sites of GEBx0328. No detectable off-targets could be detected at site 2 (CFTR-NGGCCT-T5) and only one off-target site could be detected at site 1 (CFTR-NGGCCT-T3).

### Example 8. Base-Editing Efficiency Assay for nCas Protein

[0314] To generate Cas base editor, Escherichia coli tRNA adenosine deaminase (TadA-8e) was fused to the N-terminal of GEBx0305, GEBx0308, GEB328 nickase (GEBx0305-D11A, GEBx0308-D10A, GEB328-D12A) with an ABE-linker (SEQ ID NO: 868). the HEK293T cells were cultured in DMEM media supplemented with 10% fetal bovine serum (Gibco™). For reverse transfection, the HEK293T cells were cultured in DMEM media supplemented with 10% fetal bovine serum (Gibco™). A volume of 100 μL of cells with a density of 25,000 cells/well was seeded onto a 96-well plate 24 hours pre-transfection. Cells were transfected with a lipoplex containing Lipofectamine™ 3000 (0.4 μL/well), P3000 (2 μL/well), pABE-gRNA plasmid (300 ng/well) and Opti-Mem up to 25 μL/well per the manufacturer's protocol. Plated cells were allowed to settle and adhere for 72 hours in a tissue culture incubator at 37° C. and 5% CO₂ atmosphere. The nucleotide sequences of the pABE/gRNA plasmids used in this example comprise the Cas-ABE CDS (SEQ ID NOs: 861, 862, and 863, Table 9), Cas sgRNA scaffold and the corresponding spacers. 72 hours post-transfection, the supernatant was removed and the cell layer was washed by PBS. Then the genomic DNA was extracted from each well of a 24-well plate using DNA Extraction solution (Denogen (Beijing) Bio Sci & Tech Co. Ltd, Cat. DNS033-48) per manufacturer's protocol. All DNA samples were subjected to amplicons NGS analyses.

[0315] To quantitatively determine the efficiency of editing at the target location in the genome, NGS was utilized to identify the presence of insertions and deletions introduced by gene editing. Primers used for NGS which around the target area within the endogenous genes were designed. Additional PCR was performed per the manufacturer's protocols (Illumina) to add chemistry for sequencing. The amplicons were sequenced on Illumina iSeq 100. The reads were aligned to a reference genome after eliminating those having low quality scores. Q30 rate is more than 0.9. The reads length is between 130 bp-140 bp. The resulting files containing the reads were mapped to the reference genome (BAM files), where reads that overlapped the target region of interest were selected and the number of wild types reads versus the number of reads which contain an A to G substitution was calculated. The number of the reads mapped the reference genome is more than 1000.

TABLE 9
CDS sequences of the exemplary ABE sequences.

| Name | SEQ ID NOs |
|---|---|
| GEBx0305-ABE-DNA | 861 |
| GEBx0308-ABE-DNA | 862 |
| GEBx0328-ABE(D12A)-DNA | 863 |
| GEBx0305-ABE(D11A)-protein | 864 |
| GEBx0308-ABE(D10A)-protein | 865 |
| GEBx0328-ABE8e-protein | 866 |
| TadA-8e-protein | 867 |
| ABE-linker | 868 |
| nGEBx0305 (D11A)-protein | 869 |
| nGEBx0305 (H859A)-protein | 870 |
| GEBx0305-dCas (D11A/H859A)-protein | 871 |
| nGEBx0308 (D10A)-protein | 872 |
| nGEBx0308 (H862A)-protein | 873 |
| dGEBx0308 (D10A/H862A)-protein | 874 |
| nGEBx0328 (D12A)-protein | 875 |
| nGEBx0328 (H903A)-protein | 876 |
| dGEBx0328 (D12A/H903A)-protein | 877 |

[0316] FIG. 25 shows the A to G conversion base editing frequency in HEK293T cells by GEBx0305-ABE at adenines for five endogenous genes sites. sgRNA sequence used in this experiment harbored GEBx0305-M5 (SEQ ID NO: 471) scaffold with 21 nt spacers (SEQ ID NOs: 703, 722, 723, and 725). GEBx0305-ABE exhibited efficient A to G conversion across those sites.

[0317] FIG. 26 shows the A to G conversion base editing frequency in HEK293T cells by GEBx0308-ABE at adenines for five endogenous genes sites. sgRNA sequence used in this experiment harbored GEBx0308-M4 (SEQ ID NO: 458) scaffold with 21 nt spacers (SEQ ID NOs: 710, 726, 727, 728, and 667). GEBx0308-ABE exhibited efficient A to G conversion across those sites.

[0318] FIG. 27 shows the A to G conversion base editing frequency in HEK293T cells by GEBx0328-ABE at adenines for five endogenous genes sites. sgRNA sequence used in this experiment harbored GEBx0328-M6 (SEQ ID NO: 498) scaffold with 24 nt spacers (SEQ ID NOs: 790, 797, 801, 809, and 815). GEBx0328-ABE exhibited efficient A to G conversion across these sites.

### Example 8. Evaluation of GEBx0308 on Specific Knock Out at RHO-P23H Site in HEK293T

[0319] Design of editor plasmid and target plasmid: The editor plasmids were designed and generated containing both SaCas9 (SEQ ID NO: 906) or GEBx0308-coding gene (SEQ ID NO: 252) and the corresponding guide sequences (RHO-P23H sgRNA (SaCas9) which is the single guide RNA for SaCas9 and has the sequence of SEQ ID NO: 904; and RHO-P23H sgRNA which is the single guide RNA for GEBx0308 and has the sequence of SEQ ID NO: 902). The target plasmid was designed and generated harboring sequences of RHO-WT (˜170 bp), RHO-P23H (˜170 bp, c.68C>A) and a 500 bp long unrelated sequence to separate RHO-WT and RHO-P23H.

[0320] Evaluation of GEBx0308 on specific knock out at RHO-P23H site in HEK293T, HEK293T cells were cultured in Dulbecco's Modified Eagle's Medium (DMEM, CORNING) containing 2 mM L-glutamine (GlutaMAX™-1, Gibco), supplemented with 10% fetal bovine serum (FETAL BOVINE SERUM, GEMINI) at 37° C. in 5% CO₂-buffered incubators.

[0321] To evaluate the specific knock out efficiency of SaCas9 (SEQ ID NO: 906, Table 10) and GEBx0308 (SEQ ID NO: 252) on RHO-P23H site, Editor and Target Plasmids were co-transfected into HEK293T cells. Each well of a 24-well plate was seeded with 1.0×10⁵ cells. Editor Plasmids and Target plasmids were co-transfected into HEK293T at the ratio of 2:1 and 3:1 (w/w) using Lipofectamine 3000 Reagent as per the manufacturer's instructions (Life Technologies). After 72 hours of incubation, the cells were harvest and lysed to release the Target Plasmid. The editing efficiency at RHO-WT and RHO-P23H site was analyzed via NGS with potentially edited Target Plasmid as template, using Target Plasmid specific primer pairs. The results are shown in FIG. 28.

TABLE 10
The exemplary sequences related specific knock out at RHO-P23H site

| Name | SEQ ID NOS | Sequence |
|---|---|---|
| RHO (P23H) | 901 | TGCGACGGGTGTGGTACGCA |
| spacer | | |
| GEBx0308-RHO | 902 | TGCGACGGGTGTGGTACGCAGTTTGAGAACCTTGTAAATTAG |
| (P23H) sgRNA | | AAATAATTTACAAGGTGAGTTCAAATAAGGATTTATCCGAAAT |
| (DNA) | | CGCCGAAATGGCCCACATTGTGTGGATAAAAAAGACTTTATT |
| | | ACAAAGTCTTTTT |
| GEBx0308-RHO | 903 | UGCGACGGGUGUGGUACGCAGUUUGAGAACCUUGUAAAUU |
| (P23H) sgRNA | | AGAAAUAAUUUACAAGGUGAGUUCAAAUAAGGAUUUAUCC |
| (RNA) | | GAAAUCGCCGAAAUGGCCCACAUUGUGUGGAUAAAAAAGA |
| | | CUUUAUUACAAAGUCUUUUU |
| SaCas9-RHO | 904 | ACGGGTGTGGTACGCAGCCACTGTTTTAGTACTCTGGAAACA |
| (P23H) sgRNA | | GAATCTACTAAAACAAGGCAAAATGCCGTGTTTATCTCGTCA |
| (DNA) | | ACTTGTTGGCGAGA |
| SaCas9-RHO | 905 | ACGGGUGUGGUACGCAGCCACUGUUUUAGUACUCUGGAAA |
| (P23H) sgRNA | | CAGAAUCUACUAAAACAAGGCAAAAUGCCGUGUUUAUCUC |
| (RNA) | | GUCAACUUGUUGGCGAGA |
| SaCas9 CDS | 906 | ATGGCCCCAAAGAAGAAGCGGAAGGTCAAGCGGAACTACAT |
| | | CCTGGGCCTGGACATCGGCATCACCAGCGTGGGCTACGGCAT |
| | | CATCGACTACGAGACACGGGACGTGATCGATGCCGGCGTGCG |
| | | GCTGTTCAAAGAGGCCAACGTGGAAAACAACGAGGGCAGGC |
| | | GGAGCAAGAGAGGCGCCAGAAGGCTGAAGCGGCGGAGGCG |
| | | GCATAGAATCCAGAGAGTGAAGAAGCTGCTGTTCGACTACAA |
| | | CCTGCTGACCGACCACAGCGAGCTGAGCGGCATCAACCCCTA |
| | | CGAGGCCAGAGTGAAGGGCCTGAGCCAGAAGCTGAGCGAG |
| | | GAAGAGTTCTCTGCCGCCCTGCTGCACCTGGCCAAGAGAAG |
| | | AGGCGTGCACAACGTGAACGAGGTGGAAGAGGACACCGGC |
| | | AACGAGCTGTCCACCAAAGAGCAGATCAGCCGGAACAGCAA |
| | | GGCCCTGGAAGAGAAATACGTGGCCGAACTGCAGCTGGAAC |
| | | GGCTGAAGAAAGACGGCGAAGTGCGGGGCAGCATCAACAG |
| | | ATTCAAGACCAGCGACTACGTGAAAGAAGCCAAACAGCTGC |
| | | TGAAGGTGCAGAAGGCCTACCACCAGCTGGACCAGAGCTTC |
| | | ATCGACACCTACATCGACCTGCTGGAAACCCGGCGGACCTAC |
| | | TATGAGGGACCTGGCGAGGGCAGCCCCTTCGGCTGGAAGGA |
| | | CATCAAAGAATGGTACGAGATGCTGATGGGCCACTGCACCTA |
| | | CTTCCCCGAGGAACTGCGGAGCGTGAAGTACGCCTACAACG |
| | | CCGACCTGTACAACGCCCTGAACGACCTGAACAATCTCGTGA |
| | | TCACCAGGGACGAGAACGAGAAGCTGGAATATTACGAGAAG |
| | | TTCCAGATCATCGAGAACGTGTTCAAGCAGAAGAAGAAGCC |
| | | CACCCTGAAGCAGATCGCCAAAGAAATCCTCGTGAACGAAG |
| | | AGGATATTAAGGGCTACAGAGTGACCAGCACCGGCAAGCCC |
| | | GAGTTCACCAACCTGAAGGTGTACCACGACATCAAGGACATT |
| | | ACCGCCCGGAAAGAGATTATTGAGAACGCCGAGCTGCTGGAT |
| | | CAGATTGCCAAGATCCTGACCATCTACCAGAGCAGCGAGGAC |
| | | ATCCAGGAAGAACTGACCAATCTGAACTCCGAGCTGACCCA |
| | | GGAAGAGATCGAGCAGATCTCTAATCTGAAGGGCTATACCGG |
| | | CACCCACAACCTGAGCCTGAAGGCCATCAACCTGATCCTGGA |
| | | CGAGCTGTGGCACACCAACGACAACCAGATCGCTATCTTCAA |
| | | CCGGCTGAAGCTGGTGCCCAAGAAGGTGGACCTGTCCCAGC |
| | | AGAAAGAGATCCCCACCACCCTGGTGGACGACTTCATCCTGA |
| | | GCCCCGTCGTGAAGAGAAGCTTCATCCAGAGCATCAAAGTG |
| | | ATCAACGCCATCATCAAGAAGTACGGCCTGCCCAACGACATC |
| | | ATTATCGAGCTGGCCCGCGAGAAGAACTCCAAGGACGCCCA |
| | | GAAAATGATCAACGAGATGCAGAAGCGGAACCGGCAGACCA |
| | | ACGAGCGGATCGAGGAAATCATCCGGACCACCGGCAAAGAG |
| | | AACGCCAAGTACCTGATCGAGAAGATCAAGCTGCACGACATG |
| | | CAGGAAGGCAAGTGCCTGTACAGCCTGGAAGCCATCCCTCTG |
| | | GAAGATCTGCTGAACAACCCCTTCAACTATGAGGTGGACCAC |
| | | ATCATCCCCAGAAGCGTGTCCTTCGACAACAGCTTCAACAAC |
| | | AAGGTGCTCGTGAAGCAGGAAGAAAACAGCAAGAAGGGCA |
| | | ACCGGACCCCATTCCAGTACCTGAGCAGCAGCGACAGCAAG |
| | | ATCAGCTACGAAACCTTCAAGAAGCACATCCTGAATCTGGCC |
| | | AAGGGCAAGGGCAGAATCAGCAAGACCAAGAAAGAGTATCT |
| | | GCTGGAAGAACGGGACATCAACAGGTTCTCCGTGCAGAAAG |
| | | ACTTCATCAACCGGAACCTGGTGGATACCAGATACGCCACCA |
| | | GAGGCCTGATGAACCTGCTGCGGAGCTACTTCAGAGTGAAC |
| | | AACCTGGACGTGAAAGTGAAGTCCATCAATGGCGGCTTCACC |
| | | AGCTTTCTGCGGCGGAAGTGGAAGTTTAAGAAAGAGCGGAA |
| | | CAAGGGGTACAAGCACCACGCCGAGGACGCCCTGATCATTG |
| | | CCAACGCCGATTTCATCTTCAAAGAGTGGAAGAAACTGGACA |
| | | AGGCCAAAAAAGTGATGGAAAACCAGATGTTCGAGGAAAAG |
| | | CAGGCCGAGAGCATGCCCGAGATCGAAACCGAGCAGGAGTA |
| | | CAAAGAGATCTTCATCACCCCCCACCAGATCAAGCACATTAA |
| | | GGACTTCAAGGACTACAAGTACAGCCACCGGGTGGACAAGA |
| | | AGCCTAATAGAGAGCTGATTAACGACACCCTGTACTCCACCC |
| | | GGAAGGACGACAAGGGCAACACCCTGATCGTGAACAATCTG |
| | | AACGGCCTGTACGACAAGGACAATGACAAGCTGAAAAAGCT |
| | | GATCAACAAGAGCCCCGAAAAGCTGCTGATGTACCACCACG |
| | | ACCCCCAGACCTACCAGAAACTGAAGCTGATTATGGAACAGT |
| | | ACGGCGACGAGAAGAATCCCCTGTACAAGTACTACGAGGAA |
| | | ACCGGGAACTACCTGACCAAGTACTCCAAAAAGGACAACGG |
| | | CCCCGTGATCAAGAAGATTAAGTATTACGGCAACAAACTGAA |
| | | CGCCCATCTGGACATCACCGACGACTACCCCAACAGCAGAAA |
| | | CAAGGTCGTGAAGCTGTCCCTGAAGCCCTACAGATTCGACGT |
| | | GTACCTGGACAATGGCGTGTACAAGTTCGTGACCGTGAAGAA |
| | | TCTGGATGTGATCAAAAAAGAAAACTACTACGAAGTGAATAG |
| | | CAAGTGCTATGAGGAAGCTAAGAAGCTGAAGAAGATCAGCA |
| | | ACCAGGCCGAGTTTATCGCCTCCTTCTACAACAACGATCTGAT |
| | | CAAGATCAACGGCGAGCTGTATAGAGTGATCGGCGTGAACAA |
| | | CGACCTGCTGAACCGGATCGAAGTGAACATGATCGACATCAC |
| | | CTACCGCGAGTACCTGGAAAACATGAACGACAAGAGGCCCC |
| | | CCAGGATCATTAAGACAATCGCCTCCAAGACCCAGAGCATTA |
| | | AGAAGTACAGCACAGACATTCTGGGCAACCTGTATGAAGTGA |
| | | AATCTAAGAAGCACCCTCAGATCATCAAAAAGGGCAAAAGG |
| | | CCGGCGGCCACGAAAAAGGCCGGCCAGGCAAAAAAGAAAA |
| | | AGGACTACAAGGACGACGACGACAAGTGA |

While preferred embodiments of the present invention have been shown and described herein, it will be obvious to those skilled in the art that such embodiments are provided by way of example only. It is not intended that the invention be limited by the specific examples provided within the specification. While the invention has been described with reference to the aforementioned specification, the descriptions and illustrations of the embodiments herein are not meant to be construed in a limiting sense. Numerous variations, changes, and substitutions will now occur to those skilled in the art without departing from the invention. Furthermore, it shall be understood that all aspects of the invention are not limited to the specific depictions, configurations or relative proportions set forth herein which depend upon a variety of conditions and variables. It should be understood that various alternatives to the embodiments of the invention described herein may be employed in practicing the invention. It is therefore contemplated that the invention shall also cover any such alternatives, modifications, variations or equivalents. It is intended that the following claims define the scope of the invention and that methods and structures within the scope of these claims and their equivalents be covered thereby.

The application's sequence listing, which the Patent Office published only in electronic form, follows.

SEQUENCE LISTING (923 sequences)

SEQ ID NO: 1 - protein, 1045 aa, synthetic construct
MGLILGLDLGVSSVGFGIIEEDTYNIVDYGVRLFDEADANNNLKRRTMRGARRLKSRKRNRIQALKYYLCQIGLVNTIDFEKLNNVYELRVKGLNEKLSSLELVNVLVNIAKHRGVAYDIAIDEKDKEAEALSSALSLNTKSLSNQQKYVCEIQFDKLKNGEKLRTTNNLYKSCDYEKELRKILSNQDLKPEDIEKIVDIIFRKREFSEGPGSEKFPTPYGSYRWIDNVLQHVNLIEVMRGKCSIFPEESRIAKCCYQACLFNLLNDLNNLTILKNGEKVKLTKEEKQNVIDVINEKGHITPKQLMKKLGVDEEHISGFRVDKNNKPLLTTFDIYEKMLKLELNSDFINDKNEIDQVIEVLTKTIVVGKRMEELSNLDIKLSKEEIEKLSTLTKVNGYHSLSKKAMDILIPELLSSNFNQMELIHNNNLFQNKLDFSTKNIPFDDSSILSPVAVRVHKQTLLIVNKLREEYGEFAAIVIETTRAKNSQEEKREEIEKQKKFEDAKTITNEFLFKKGLNPEKVNTNTKLKLRLYNEQNGKTIYSGETIDLDLLLNDDKAYEIEHIIPFSISFDNSLNNKALASHQENQDKGNHSPWGYFSSGKVEGPNDSWEKYVAFVNVLNLNPKKKENLLRQEDITKYENRKSFINRNLNDTSYGIRTVMNTLKSYFKANQISTNVFTIKGKITSAFRGRVGLKKDRDEYIHHAIDALIIASFKNQKTFYEAFELGTTEQGDLYHLQTGELFDLENPLEDSKLLKFISNLKNIHGIPNDFSYKVDTKTNRQFSDETIYSTRKYEDGEYVIKKYKDIYGKDDGEKVKKLFEKNEATKLLVYRNDKQTFELLEKIVNAYSNEKNPFAKYKEEHGYIRKYSKKGDGPIIKQLKYVDGKLGNYLDITQKYPKTNDKKVVLLQNTPYRTDFYISKEGFYKFLTIRRFHIKQIDGLNVIDYDLYQSLKENKKITLDDEYLFTLNRNNIIHIVGEKDEYFKFIATNNDIKNIIEVKRIERLTEKQMMVSIGKKVKKIEKYNVSPIGKYQKVVKETLKLVWK

SEQ ID NO: 2 - protein, 1109 aa, synthetic construct
MSKLAMGIDIGITSVGYGVIDLDDGKFIDYGVRLFKEGTAEDNEKRRNARGRRRLTSRRHTRLRDMNKALEQFQIKGSDYHPLSNVYELRCKGLKEKLTCDELTAVILHITKHRGSTLDVVEENEAKNADILSTKEILRKNDEEIKQGKFICEIQMERLLMNHSVRGHANNFTTKDYVSELQEILKHQDLSAEAIDAIITIVQRRRAYYEGPGSEKSPTPYGRFIEENGGVVQIDLIEKMRGKCSVFPDLARAPKMSISAELFNFLNDLNNLVVNGEKLSVEAKHQIFSIVNKKGKITLKQLAKCLQVEESDIKGYRIDKKDKAQFTEFKGYKKLKQLCQEDGLAVSLQDYEMLDEIIEILTKKKGIEERKEALKGSVFGMSDYLVDILAEATGITGYHALSLKALRMLNKEMFYSEFNQMQLLHQLNLLNQNRISYKGQRNITANADAILSPVVKRAQNEAFKVINQLRKKYGEFDTIVIEMARDKNSNEQKKRINDMQKRREKSREEMDKMLKDLGYDLDKINSKIRMKLSLYEQQEGKSAYTFQPIDLKRLITDPKYTEIDHIIPISISLDDSQNNKVLALQSENQMKSYLTPFMAFQANKFADMTYPEYKARVLSNPKYSYKKKMNLLNESDITKMDVKKDFINRNLVDTRYACRVVLNTLKDYFKDNEIHTKVHTINGQLTHLFRRKSHLDKDREENFLHHAIDALIVVSIKKLQLVNNYLFLSDMENQGNGGNETTSSIPSDEQFYEEHYLRYISDLRTLYQQSSQYYNRLISLSDMMYAPIKISHKIDTKANRQFADETIYSTRNRDGIDYVVEKIPDIYDPKSKKCKALVESILNHDDQKYLMARNDPQTFAILKEIVQNHYVMYKQDETWYGVKNGKIELKGENPLAGYKKEHGFIKKYAKRGNGPAIVSMKYESEKLGVHLLISRNYDLKDNKKVVLRQISPYRTDFYHCDDGKFRFVTVRYANVKYDKKEKKYVISKQWYEDEMQKKNIKSTDEFLFSLHRDELIGIIRKQGDSYYYDASTEGKGDKQYSDGIHPEILKFTGTNNDAKGVIEVKPIYAYCKKQLMPSIQSVVGLKKFSTDALGNLYEVKKNTLKLEFD

SEQ ID NO: 3 - protein, 1151 aa, synthetic construct
MDKKIKVNIGLDIGITSVGWSILDEDNNILKLGVRLFDDVANEKDGKLDNVQRRECRTQRRRIRRARTRKQAYLNYLVSQNWFNSYDEAVEFITNFDLIKFGYDNPIELRIQALENKISKDELIFLLFHYLHHRGYLYITESDADKLNENDENKKEFPSLKIYKFYKNYEYYKGSIVSDNSAYDFANEIRQILNIQGIDENFANYYINELFLKHRDYSQGPGSEKSPTPYGMWYWDDKEQKVTKREGDSLWDSLVGKCSYYPDEKRGLAKSPIAEIFNLLNDISNIYFINNSNIKLTEDERNKIFSQYNNSLLKTKSFNLTPKELLKILQLKCQDQNIDESDIYGYRVDGDNKKIITELKNYCQIIRWAKEYLVNKDEINLFNLEILNFANNIFVELSKTQDLKKRLEILKNIKSKLLNENKFTNIDSDKSYNLDIKLIKGLKGLTKTHTLSYKAMEEFIKFSLSNGSENLNWMRYSNFNKNLNNTNQKKSSKYLKKIDREEVISPTTRRAFNQTINVLNKILKLYSNEYEIKNITVEVARDKNSCEERKVITSSQNKNRKEVEEILKNIGNKKFEDLNAAQILRIKLWNRQRQFDIYDSKLGENESKISFDDVINGNKLDIDHIIPYSISQDDSINNKVLTRRENNQVDKKQQTPYQFFSQLGKWDDYKEKIEKFFSDKLKEKWIKNLLYIGNPLTDIDSFVGRNLSDTRYASRLVLNVLQEFFKNNKNYGNTKIKVIRGGITNFARYNLFTNGAGKSLIPKNRDIYCHHAIDASIVSYLGSNHNIKLLLNHAQQEYNDLKKKNNFEIDEDKRLVNKETGEVIESWYAKNGESRLFAEQLKQYNTIYNKSEGCLIPGSKSNEIKFSRMYINKNNVQLSNETIYSFRFKKDENGNQLDDGIIIDYIKVLESKTSDLEKYFIDEKIQEKDLEKLLCYKKNPKLYNKLKMIFNRYYKSGDNTNPFIRYMEEECKIEKPKWIQVGNLRINKLRLIGETKNSNSVIILNKHNKKAIYKSLKFLFLRIYKDNNDKYRLIGINQKVLTYDKKKSQLKIDKNKLDKVLELNNIFNSEKYIDIKRGMIFVRKEDNKLFWSIGGGTLSQNKLELKSINTSNEISNLGKQFQRSLSTIVAEYDIAQVDELGNIYNRRKIEL

SEQ ID NO: 4 - protein, 1265 aa, synthetic construct
MDIGTKSLGWSIIGKNKENNEWDIIDFGVRIWDAPEVSKTLDTSAKVRREARSSKRMFRRRRARIKDLKDYLVNELNLISYKEINDHFDKLKEKNDYSVTNKKYRNDINPLFLRYRAIKNEEKLTSLQLIIVLLSFAKRRGYENKFSFEEDKGGYGSSSKKFIGKTEEGNKKYQFPILAIMEDDFFKSNNIGKEQEYFYRNRKNNKINKSDKNKEVEREQILFLTKDNKEELRKILAIQQKFYLELTNERVDFILDEIIFRKRDFEDGPGPKQENLKESWKNSLNKINYYKPFIENVGKCRFVEGEYRTNPFSILGDLFLIQNYLGQVFPKNVLKVKKIDNITLKKIAKEIINEYLNNFVLDEKIFTKILKNNNLIYSEFDNFKKMEKNNPLEQLFLASLAKIKQPFAFKETLKEYLSSINLNELSFDAFENNPINKLGKVLYENKTPSRIVNKIKELEIKNLNPDEVEIWIKKFNDQLKKVKNRTFSVSSKHIFNALEKLLQEGIIISEYQAELEKKQKQEAINKIENNNSNNFLSLPKDQDMKKNAVVFRSINQTRRVLKQIFKTYGPIETVVLETAGDLYNEISVRKRISNQQESLVKEKEERSRRLKALGVNVTGANDLKLRLFDSQKDLKEISKKNVRSIDPYSLYKDNIEYINERDIFTSKYEVDHIIPYSKSNDDSLANKVLVSRTNNQLKGNRTPYQWITNSFGEKAFDNFKKNIKTYYFKGNKNLGKFARRNENLLKKNFSRESYLENETAKINDTRYITSYIANYLELEMEKYKRINGLNYTPEIITLNGNVTSYMRRVWLSNDNWGNFLKPRNITPFHHAIDAIILANLFDKYQAFYSNLILRIEKFYWDQFNFVKKHDIDFETTKSFFENYQNIIEYQIKFATRYFKTEEVEEETIKAAKIAKQNKMIEEVKLLFEYLLINIQEKNVLDFKTDPNINYLFAPIVSNLDEKVENLIPIKISIKEEVIKEDIKQTNIEANMMDIPQDEVDNKRLSNTDKNELRRKNIILEEIVSPQDWAQKNNREIKDFPYISYKENYKRSGNFAKANPIKKEVVLGKMIDFLIQEEKAHQKEVKTIGMVDAKREIANSKARIVDLQEQLKTKNYLSLTKENIDRQGIYVFSGENYYETSEYLGLRFNEETHKFEKYNLFNAIKNGKNKQNKNELLIVRNTTFKLKDEDWFYNYKGFSGVGFAKSPNLLYYSSVPTLRITFKESDKVSEHSPIIYSISSLINKIEGIVEINTLGKYQGIRKLTNL

SEQ ID NO: 5 - protein, 1337 aa, synthetic construct
MKDYFMGLDMGTGSLGWAVTDSSYCLCRAHGKDLWGIKLFESANTAEERRVFRCGRRRLDRRNRRIQLLQQIFAEEMAKVDPGFFLRLKESRYVPEDKRDLNGQTPELPYALFVDQSYTDKDFHRDYPTIYHLRKELMESCEAKDIRLVYLALHHIIKHRGHFLFSGIEADKITDFYGTFTKFIQVLKEQELEFNLEPDRDQCVQAKEILENPQLTKTAKASGLIQKLQAKTDCEKAVMRLLAGCKVKLSGIFEDKAYDETEKPQISFSEAGYDEYEEILEGVLNDQFIVIAAAKAIYDWSMLVHILGDARTISEAKVKVYEKHRRDLKILKDMVRNHLSREDYKEIFAVTDEKKNNYCAYIGMTKSNNKKVPLAGKECSREEFYAFLKKEVVDRIEDKSVTEMLSQEIELGTFLPKQVCKENGVIPYQLQEVELLKIVKNAGEYLPFLKENGDKIQNILTFRIPYYVGPLNVVKEADHSFAWAKRKSGEPVYPWNFEEVIDVEASAEIFIRRMTNKCTYLPSEDVLPRESLLYSKFMVLNELNNLRVNGEKISVELKQDLYENLFKRYRKVTVKKLKNYLIQEGIVEKGVDLSGIDGDFKASLKSYHDLKEKLTGLPLSETEQEQLILNVTLFGDDKALLKRRIKKMFSSLTEGQVKGICALSYKGWGRLSRKFLEEVISPVPETGEIKNIIGALWETNDNLMRLLSNRYGFLDAIDELNSDGQKSELTYKTVEQLYVSPAVKRQIWQTLKVVKEIKKEMGGDPRRVFLEVAREKQDSGRTMSRKKTLQELYRKCQEEEHDWLGEIGNWDEHTLKSDRLYLYYTQKGRCMYCGKRIDIQNLWDKNTYDIDHIFPQSKVMDDSLRNRVLTCRTCNANKTDHYPLHGDIRQNMKPFWSNLKNTGLIDEEKYKRLIRADEFSPSELAGFIERQLVETRQSTKAVADILKKAMPDTEIVYVKAKTVSAFRQQFELIKVRELNDYHHGKDAYLNIVVGNTYFVKFTKNASWFIEQNPGRSYNLKRMFEFDVESKGETAWKAGSKGTINIVRKMMEKNSLLFTRRSFEVQGGLFDQQLMKKGKGQVPIKSSDKRLLSIEKYGGYNKATGAYFVVVESEGKKGMMKRTIECVPLYRKKELDNSEEKLLEYLEEEMQLKNPRILLKKIKTDTLFNIDGFRMHLSGRTGKQLLFKGANQLLVNSEQEKVLKKVVKITEQIKQNKSYKINTYDGVTDENLNDLYQLFMKKIENPPYNVRLSSQNPVLAKGKDKFEHATQENKCQILYEILHLFQCNSGAADLTGIGGAKKAGILVLAKDITKCGQISIIYQSPAGIREREIDLKRL

SEQ ID NO: 6 - protein, 1338 aa, synthetic construct
MRDYFVGLDMGTGSTGWAVTNEEYEILRAHGKALWGVRLFESANTAEERRVFRTARRRLARRNWRIEILQEIFAEEIHKADDGFYLRMKESRYVPEDKRDSLGKCPSLPYALFVDSDYTDKDYHGQFPTIYHLRKYLMETRETPDIRLVYLALHHMMKHRGHFLFSGNIESIKKFESTFGQFLDRLEEEELEFHLIAEARENFGGIEAILKDSALTRSAKKTRLVKLLGAGTSCEKAVLSLIVGGTAKLSDIFGDDELNQCERPKICFADSAYEDYADSVAGELGERFLVIEQAKTIYDWAVLADILGEYDSLSEAKVAVYEKHKKDLDCLKTFVRENLGPDVYRRVFVISDEKLDNYGAYIGMTKNNGKKCDLAGKKCDRDAFYAFLRKEVLNNAPDGETAEYIKQELDKGTFLPKQVTKENGVLPYQVHLFELKQIINNLKDRILLLRENEEKILKTFTFRIPYYVGPLNGVRRGGDTTNWVKRRTDDKIYPWNFSEVVNEEESAERFIRRMTNKCTYLIHEDVLPRYSMLYSKYTVLNELNNLRLNGEPIDVRLKQNIYNDVFMRYRKVTQKKLRDYLVREGIADKNVDITGIDGDFKGTLTAYHDFKEKLTGVDLSQEEKENIILNITLFGDDKKLLLRRLKAMYPKLSDGQQKALCGLSYNGWGRLSEAFLERVTAPAPQTGEVWNIMRALWETNDNLMQVLSEKYRFAEAIEEENGADELQEISYQTLEQLGLSPAVRRQIWQTLKIVREICKVQGGPPKRIFVEMAREKSESKRTESRKSRLMDLYKSCKEEEREWLEELSHIDEHSLRSDKLYLYYTQKGRCMYSGEPIALSELWDNRKYDIDHIYPQSKVMDDSLDNRVLVKKTYNANKTDRYPIDADIRNKMKPVWKSLLDGKFISKEKYNRLTRGTGFEPSELAGFIERQLVETRQGTKAAASILKQAFPDTEVVYVKAKVVSQFRQEFGLIKVREMNDYHHAKDAYLNIVVGNVYYTKFTKNAAWYVRQNPGRSYNLKRMFTSEDVVRNGEVAWKAGESGTVGVVKRTMGKNHILVTRRAYQVKGGLFDQQLMKKGKGQVPVKSSDERLLSIEKYGGYNKAAGTYFMLVESEDKKGNAIRTIEYVPLYLHKQIEAGEDQALRYLTKERALKNPQILIPRIKIDTLFKVDGFYMWLSGRTGKQLLFKGANQLVLSARDAKTLKKIVKYVQRRKENPKLTIGNQDEIHTEDLLCLYDAFLDKIKYTVYHSRLSAQEKTLTEKREVFLELNKEEQCLVLFEILHMFQCQSGSANLKLIGGPGNAGILLLNSNITKCNQISIINQSPTGIYETEIDLKKL

SEQ ID NO: 7 - protein, 1344 aa, synthetic construct
MSRKYSIGLDIGVASVGWACMTSDFRIPKYNERYAIGVREFEAADTAEERRIQRGTRRRYNRRIKRIQLLQQSLEALLQQHPNFLMKTEATEKHFWRNNNQFENRSLSEVLADLGENTRKYPTIFHLRQALLSENKPFDSRLIYIVLHNLVKYRGHFLNENMEWNNSSNNETTIDLTKEYFSILTNLGYETDDLLDSNHETTLHDIIQILKSNDYTNNDKRNSIKKLIGKEFHDPITLIVGLKSDMHKLFPNSEGAAIYQSEKLKMSFADEDITEVYEKLTDEEKLVIDQANKVYQHILLNDLLDGHNSVAAAKVTSYNQFSEDLKLLKDVFNKYLGEKAYRDMFITTRKKWTQYQQTRKNNLLCTFDQFLKIHATEDKFYRDLKKTIENIIKKEQNAELQAVLDKLNNNQFLQKQKSYLNAAIPHQNNVYEAETILKNQQQFHPEITDNVIEKVREIISFRIPYYIGPLVKKATDDDFGWAIRKDEQQHVLPWTIDEVIDRSNSAEQFINRMTSYCAYLTNEKVLPKHSLTYELFEVLNELNGIQIRRENDLPDKDFRLSEEEKLWIINNVFKKYKNVTHTILLRELRNSDHKELVLDTDTDNLKQVYGTQKENKFGSSLSSYITLSEIFNNIEEVDNDMLEELIYWITVFEDKEIIKLKIKEKYKDINDKQINRLINLPFAGWGRLSNKLINELPADKNSGETILDIMTKDALVFMEILSIEKYNLNERITTLNLKNNESYTKIKYKDIAELQGSPALKKGIWQAILIIEELVEIFGEPEHIMIEFAREDGPNIRTKSRQKHLADLQKAISKDEKELKAFLKEHSHYEEQKYKNDRLFLYITQEGKCLYTGEPLVISRLQDYEVDHILPRSFVKDDSIDNLALVTYTANQDKGDTKMPLETMNEEEKFQQKQHWKKLFDNKLISQSKYFKLMKESFSDQDKESFFARQLVETRQITKHVKDLLNDRFEHTEIHPVNANIVTNLRKHADVVKIRDLNNKHHAIDAALAVLVVQFIVKQYGHNFLNFNFKFQEARKKWRDMLTKYNKNFFLFSDIDKYDKFTHYSTGEILSGREFMSTLNSEIPWQTTKKIGSSESAFYKQTLHSPQVKTAKYSSDKTVHGVYDEMKNDSTYLISYKELNKKGKEIIKNDFVDLYVIEKYQLKEKGQKDLALFLASKTAKGEVVDATIHTKIEKFQMVSYEGHEFYYISSGEMHNAKQLLLPNKVIDTINKVRSNPNENNDPTMLANTFKNIANEVIKQYSEFLPDSRIDLLKNYHSEIVDAESFNHGITELFKTTSASAARSQLFGARYVKKPKPEQLLFNHSSITGLRYRKPKSYKQDLWSQ

SEQ ID NO: 8 - protein, 1349 aa, synthetic construct
MKNKMKVSSGGQEYYLGLDMGTSSVGWAVTDMNYRLIKKHGKMLWGIRLFESANTAEARRVFRGARRRIQRQKKRIELLQEIFSGEITKEDPGFYLRMKESKYYPEDKRDQSGATPVLPYALFVDSHFTDKEYHERYPTIYHLRYELMYGQGRKFDVRLVYLALHHIIKHRGHFLFEGKEMSVIQDFVPAFDLFLSYALENGIEISVGENQKQEIQKIMADRKLGRTAKKQAMGKVFGTDRQKKALAALLAGSSVKLADIFGDPSLDEGEQKKISFADSSFDDHINEVEDILQERFPLIATAKAVYDWAVLTDILKDSCCISEAKKKIYDKHREDLRRLKELLRNQSVLFQQVFGVPKKKEANYSAYIGMVKKNGKKIEIEKKCSKQEFYDFLKKVLKPLEGTEDILQEIEMGIFMPKQVVRENGVIPYQLHQYELNQILERAKEYLPFLSETDAEGYSNIDKIKKLFQFKIPYYVGPVNTFHEDQGGNCWAVRQEAGQIYPWNFEKKVDLEKSAEKFIHRMTNKCTYLVGKDVLPKESLLYAKYRVLNELNNLRIDGEIVSVELKQHIYCELFEKKRRVTGKMLKEFLVREGVIHKEQILSGIDQNFKSSLGAYHDLKQILEGTRVSDLDKEDIIKDITLFAESQNMLKKRLKTKFPELTEKQIRCLAEKKYSGWARLSREFLEEMEAVNPKTGKDCNIITALWETNDNLMKLLGHKYFYAEAVEKINEEQMDHSAISYQDVDDLYVSPSVKRPIWQAVQIVNEITRIMHGAPKRIFIEVAREKEKKPSVKNSRRKQLLDLYQSCKKEESGLYAELSQEKDNSLKSDKLFLYYAQLGRCMYSGEAIELEHLYTNRYDIDHIYPQSKVMDDSLDNRVLVKRELNAEKSDSFPVPEQFLQKAGALWRALLQKGLLSKEKYERLTRREEFSDGELAGFIARQIVETRQGTKAAAQLLKIAYPQTEIVYAKASAVSQFRQKFDLIKVRELNDYHHAKDAYLNIVVGNTYHVKFTKDAAWFIENNPGRSYNLNKMFTSERVVRNGETAWIPGNDGSICAIKEALSKNNILFTRRSFEQKGGLFDQQLVKRGKGQIPIKGAGTDSRLMATDKYGAYNKASGAYFMLVESESKKGKRIRSIEYVPVYLAKKLDMDKHSKLVYCEEKLGLKQAHIIIDKIRIDTLLDIEGFKMHVSGRTGSRLLFKGANQLVVSRRFQEVVKKVCKYYNVRNQNRNAVLSEKEELTDEVLLELYEEFQRKLSNTVYKVRLHSQIATLEKGKDRFTGLSKEEKCLVLYEILHLFQCNSIAANLKAIGGPGKGGRLVMSKDISKLNHIYMINQSITGFYEQVIDLKSI

SEQ ID NO: 9 - protein, 1351 aa, synthetic construct
MGQKDFYLGLDIGTDSVGYAVTDEQYNLLKFSGDAAWGVHLFDEAELSQERRAFRVARRRLDRRKQRVMLLQELFAPAIRAVDADFYKRLQASDLFRDEAGDRFPIFNDVDYTDRDYYKAYPTIHHLICDLMADETAHDVRLVYLACAWLVSNRGHFLSNLDKENISALKNFDKVYSEFEHFFTDNGYAYPWAEADRRTIGEILKKKTTVTAKNKELTLAFTGGGMAPKEASEDFPFGQRAIIKLLAGGTAQLKELFDQEAYAEFGAVSLNFDDDKLEEIAGNLGDDFALITALRQVFDWSVLVEAIGDAASISEAKVETYRQHKADLAILKRIIKNYRPEKYDEVFREIGKANYAAYAYHSNKKADAKFKKVDREAFSKFITGIVKDITPKAEDEEILADMRNRLDLRTFLPKQKNTDNRVIPHQLYQYELHEILKNAEGYLPFLTEKDESGLSVSDKIRSIFAFKIPYFVGPLNEKSDHAWIVRKAGKIYPWNFEDIVDLDASEEGFIRRMTNQCTYLPGEPVLPKDSLLYHKFTVLNEINNLSIHGERISVELKQQIYSDLFLNKKKVTRKRLREYLIVNGVVEKDDTDAITGIDEEIKSNLLPQISFRRLLDEGTLSEEDVEKIIERSTFSDDKTRLKKWLAREYPQLNSKDVDYIRSLRLRDFGRLSQAFLEGIIAADRSTGEAFTIISALWNTQKNLMELLSDQFTFAETIERFREDYYREHPVSLSERMDEMYLSNSVKRSVFRTLDIVKDVKKAFGAPKKIFVEVTRGGSPDQKGKRTKSRSQQLRELYDKCRDEDLPLLKQQLEAMGDAADSKLQSEKLFLYYLQLGKSAYSDKRIPLEALASKAYDIDHIYPQAFVKDDSIINNKVLVLSEENGAKSNNYPIQGSIRHHMQGFWSYLQEVGLMSKEKYKRLTRSTPFTEEERYGFINRQLTSTSQSTKAVATLLKEHLPETEIVYCKARLVTDFRQAFDLFKSRQYNDLHHAVDAYLNIVTGNVYNMRFTKNFNVHSQYSIKTETVFTRPVTYKSQTIWDGIDMLAKVKSIANKNTAHITKYAFMKKGGFFDQLPVRAADGLIPRKKHLPTQKYGGYNKPGVMFFIPVKYQLGKKSELFILPVELLCGKRFLADPEFAQAYAVKRLERILKKPVDQISFPLGMRPWKVNTVLALDGFKYCITGSSNGGTRLILQPMMSFSSAPYWAFYLKKLEVFVEKNANNPQHVYDEAYDKVNCEDNLKLYDLYCQKLTSTIYSKRINSPLDILLQGREKFSGLDIKQQAQALLNIHQVFGRIAGGCDLTLVGGKKGSAATSASSAISNLGKRYQDVRVWDTSPSGLWSKRSPNLLDLL

SEQ ID NO: 10 - protein, 1354 aa, synthetic construct
MYYGGIDLGTSSVGWAVTDTEYRLIRKKGKDLWGVRLFDEAKSAQERRSNRTARRRRARETARIGLLKSWFAEEIEKVDAGFYQRLEESKYHREDKKTGSRFAVFADREFTDREYYETFPTIFHLRKELLESKAHFDVRLVYLAVLNLFKHRGHFLNEYLEWEEHDKSMADLFQEFSETLPEEPGLQFPQIADGVQMEEILGSRLFSRSEKAEKLAACLGISRNRNKAEYELVKLFCGMSGKPSLIFGQEALSDAWGKKQVSFRSSAWEEEREALGDCLPEGCMDMIEAAKRIHDKGLLAHILKGHTYLSQARVETYEKHKEDLKKLRHVIKRYCRDEYDTYFRTMTDHNYSGYVGTVNSGKEKIRRNRGAKKEAYKAFWKETKRILDRMPPDDQEVSYLKQELEKETLLPKQRTFENGVIPNQLHLAELRKILSNAETYLSFLRKKDESGLTVTERICKLFAFRIPYYVGPLSIGEGGRNWIQRKEGGRVLPWNIEDKIDMAKTREAFILKMVRQCTYMKGKHVLPKNSLLYEAFMVLNELNNVKIRGEKLDVELKQKIYREMFLTGKKVTGKKLLQYLSANGILSPDEQDAITGIDETFHQSLTSYGRFYSILGEQIESREIQNMAEQVIFWGTVYSGDKKMAGELIRETYGERSGKPYLTEAQIRRICGFKWKDWGRLSKDFLELQGCSKKDGVKKSLIRALWETDCNLMELLGDEFTFQDTLAGQIQKQEKLLKEFCYDDLEDSYLSAPVRRMVWQTILIWKELCQVMGEAPARLFVEMPRGEGEKGKRTVSRKKKLEELYKTCKTDSRDWLKELQDLSEDDLRSRKLYLYYTQRGKCMYTGHPISLEDLLSGNRYDIDHIYPRHFLKDDSLENNLVLVEKESNGHKSDTFPIEASVRSKRQGLWKSLKDGGFISPEKYKRLTRSWEFTDEELAGFISRQIVETGQAARYITGLLDRLLPETKIIFVKAGNVSAFRHQTELFKSRVVNDFHHAADAYLNIVVGNVYDTKFTQNPIHFIKAYRRDQKSNAYHMDKLFWYDVVRNGEVAWKAGQTGTIRTVRAMMARNTPLLSKRVYEAHGGIAKQTIYSKKEAKERVYIPVKSSDKRLQDVTKYGGFRSVSGAYYFLVEHEKKGKRVRTLEQMPVYLKARLETDEKAWENYCMETLGLVRPEIRWKKIRMRSLVKRNGYLMNLAGRTENQIYVENAVSLCLSRRWINYIRGLENFKELGKEEDRRENREKRITKEKNELLYQELIVKHRDTIYQKKPNPMCKKLIEKQEAFAGLLLREQVRVLLELLKVTQCQNLNMDAKEIGVKASPDKIGNEVTAQEEFLLIEQSVTGIYSCSIDLKTV

SEQ ID NO: 11 - protein, 1355 aa, synthetic construct
MYYGGIDLGTSSVGWALTDTNYRLIRKKGKDLWGVRLFDEAKSAQERRSNRTARRRRARETARIGLLKSYFADEIDKVDTGFYQRLEESKYHKEDKKTGNRFAVFADREFTDREYYETFPTVFHLRKELLESDAPFDVRLVYLAVLNLFKHRGHFLNEYLEWEEHDKNMADLFREFYETLPEESELHFPQTADWTLTEEILGSRLFTRSEKAEKLAACLGIVRNQNKAEYEMIKLFCGMSGKPALIFGQEIAADAYGKKQLSFRSSSCEEEMEALGDCLPEGYMDMIEAAKRIHDKGLLAHILKGHTYLSQARVETYEKHKEDLKKLRHVMKKYCKDEYDAYFRTMTDHNYSGYVGSVNSGKEKIRRNRGAKKEAYKAFWKETKRLLNMMPQEDQEVFYLKQELEKETLLPKQRTFENGVIPNQVHLAELKKILSNAEKYLPFLREKDENGLTVTERICKLFAFRIPYYVGPLSVKGGAGRNWIQRKETGRVLPWNMEEKIDMAKTREAFILKMVRQCTYMKGKYVLPKNSLRYEAFMVLNELNNVKIRGEKLDVGLKQKIYRELFLTGKKVTGKKLFQYLCVNGILSPDEQEAVTGIDETFHQSLTSYGRFRSILGDEIENREMQKMAEQIIFWGTVYSNDKKMSGELMREAYGELSEKQYLTESQIRRISGFKWKDWGRLSKDFLELQGCSRKDGVKRSLIRALWETDCNLMELLGAEFTFRDTLTGQIQEQEKLLGEFCYHDLEDSYLSAPVRRMVWQTILIWKELCQLMGEAPARLFVEMPRGEGEKGKRTVSRKKRLEELYQACKADSRNWLKEIQDLSEDDLRSRKLYLYYTQRGRCMYTGHPISLEDLLLGNRYDIDHIYPRHFLKDDSLENNLVLVEKESNGHKSDTFPIEASVRRDRQGLWKSLKDGGFISQEKYKRLTRSWDFTDEELAGFISRQIVETGQATKYITGLLDRLLPETEIVFVKAGNVSAFRHQTELLKSRLVNDFHHAHDAYLNIVVGNVYYTKFTQNPANFIRAYRRDQKGNAYHMDKLFWYDVVRNGAVAWKAGQAGTIGTVRAMMARNTPLLTKRVYEAHGGIAEQTIYSAGEAKERGYIPVKSGDERLRDVTKYGGFSSVSGAYYFLVEHEKKGKRVRTLEQMPIYLKTSLEKDEEAWKNYCIETLGLVRPEIRWKKIRMRSLVKRNGYLMNLAGRTGRQIYAENAVSLCLSQKWVNYIKGLENFKESGKEEDRRENKEKRITKEKNELLYQELVIKHRDTIYRRKPNPIWTKLIEKQAVFAELSVREQVNVLLELLKVTQCQNLSMDAKEIGVKASPDKIGNEVTAQEEFLLIDQSVTGIYSCTIDLKTI

SEQ ID NO: 12 - protein, 1356 aa, synthetic construct
MKQKYYLGLDMGTSSLGWAVTNEKYSLLRKKGKDLWGVRLFEEAKTAADRRSYRTARRRLQREKARIGYLRELFSEEINKIDAGFFQRLEDSKYHKEDKREHQPFALFADKGYTDREYFEDYPTIFHLRKALLDIENEGKTFDVRLVYLAILNMFKHRGHFLNANLDDKSGGDLKEKIHILTSMANKLFDDISFKTVDIKDIEQILASKDYSNSTRLEKLLELFELSKTKNKVETEIFKMICGLKGTISKIFANESMDEEAQKLSFSFRDGNYDEKIVEMEEALSEESYEFIMIMKQVHDWAVLSNIMMGEEYLSVARVKAYEKHKKDLNMLKALLKNYSIKEYNSMFRIMKDNNYSSYIGSVISQETIRRKGKYTTDDFYKNVKSIVLKCEECTEKEYILSEIEKKTFLPKQNTTSNSVIPNQVHKKELKRILENAAKYLEFLNDKDDTGLTVSEKIVRLFEFQIPYYVGPLSNGVCDGKNVWSVRREKGAVLPWNFEEKIDVKQSSENFITKLVNHCTYLNGETVLPKNSLLYEKFMVLNELNNLKINGVKIGVELKQSIYNDVFKKGKKVTAKALIQYLKNIGEIDATEETVVSGIDGDFTNRLANYKKFIEIFKVPTLTYEQEQIAEDIIFYSTVYGESKKFLEERIREKYNEELSENQIKRILGLKFKDWGRLSKELLLLQGIDKQTGEISSIISKMWSDNYNLMELIATDKFSYGYNIEQKTSKIEKVLSDIEYSDLDEIYISAPVKRMVWQTILVLKELEKVMGCEPEKIFVEMARDANAPKKRTESRKKKFLELYKTCKKESRDWKEELEDTEESKFRSKKLYLYYTQKGRCMYSGEEIELKDLFNDNLYDIDHIYPRHFVKDDSIENNLVLVRKVDNAHKSDAVLESSIRNKMCGFWKILREGSFITDEKYKRLMRTDDFSDEERAGFISRQIVETRQGTKVIADLFTKTFPESEIIYVKAGNVSDFRKKFDFLKCRIVNDFHHAQDAYLNIVVGNVYNTKFTQNPMNFIREYNKDPKANKYHMDKLFEYPVSRNGRDAWVTKNAESICMVKKMMEKNTPLITRMNYESHGGIADQTIYSAEDAQKAKGKGYISIKSSDGNLLDTCKYGGMKKYTGTYFLLLEHTKKEKRIRTIEAMPLYLKDKLNTREKIEKYFEQSVDFAYEQPKVILDKIKMYSLIKVDGFYLYLTGRTGNQLSVCNAVQMSLSAGMVKYVRKISIANERYAADKEFEKDENISVQKNLELYEILKEKHLNQIYGKRPNPVGEKIEKGIEKFRSLSVRKQIYVLLQILQLSQLSNQGADLLEIGGEKKTGTSKLNKNITEKQEFKLINQSVTGLYENEIDLLRI

SEQ ID NO: 13 - protein, 1359 aa, synthetic construct
MNLRNVGSYDVGLDLGTGSVGWAVVDSDGGICHFKGKPTWGSRIFPSAETAAGARVHRGQRRRYDRRRQRLKWLQEFFLEDMNRLDPDFFTRLNQARLLPEDRKEGCADYHWPLFNESDFNEVDYYRSFPTIYHLRKALAEKEGKADLRLIYLAFHNIVKHRGNFLHQDVPGLSARDASAQASTSCLHEAVEEWSSLLDLGVSFDCSNFSRILEDRRLSRSDKKDALMGTFSYGRDQKKFCQAVVSAVLGYQADFGCIFQVEGEGLKFKVSEEEKAEMFVSSSLPDEGASLFDALCSVHSSYVLLGILKDSGGKTLSFCKVRDYEKYHRDLSLLKSLVRTYSPESYRDFFGGSLRQGACPSDYDPEKASGYTKYNLHKTSYEDFQKEIRKLLEAKAKLDDDYHRMMDEFAEGSFLRRLKTSDNGSIPYQLHLEEMHAIIENQKAYYPFLGENADRIESLVSFRIPYYVGPLTQQNAAVDRRGNPRFAWSVRKEGMEKAPVRPWNWDEVIDRAESAEWFIARMTGTCTYIHDEPVLPKCSLLYEKFCVFNELNGARWTQDGDSEVRFDASDREGIFEDLFKRGSVTYKKVEDWLVRRGALNPHVSGGQGESKFESKLSSHLFFCNVLEVDDLSKADADMAEEIILWNTLFEDRAILKEKIEASFGSRLNADQIRKICKKRFTGWGRLSKKLLCDIRVETNSGSKSIMDVLSEGNPNICGATKAMVFMEILRDDKLGFEEAIRNENRDRLKTGFLSVDELPGSPALRRTVNQAVRIVEEITSITKHAPDNIFIEVTRDEDPRKKGLRTKRRYDRIKEALTIFKGESSGVLSELKRRDHKELDDERLALYFMQNGRSLYSGNSLDIRRLSEYQVDHIIPQSYIKDDSFDNKALVLADENQRKLDSLLLDQSIQDNRKDEWRALFEAGLISEKKYRNLMCDSISEGRLKGFINRQIVETSQIVKYVQMMFEGLYPETSVVPVKAALSSQLREECGFVKCREINDYHHAHDALIACQIGRFIQFRHSGIYSNPIGYTKVVRDYVRQLGRQMKYSRKMPGSASFIVSSFLTSGFDPETGELFKDRWDADFECDRIRKYLNYKDCFISRMPEITSGEFWDATIYPPDKNPVLPLKKGLDPKKYGGFSSQKFAYFFVYECTKKDKKVFGFSPVPVCVAQSLGSNSRALIDYAKQLCSESGTEFVRIARKQLAKYQLVEINGERFYLTGKKEVRNATQIAFDQAQTDLLKRAFEGEISNSISLSDIYRYTLDFSDRYSSRVSALLRLRECEQEFAKLPVEIQANLIKSILQCLTAKSNRIDLSAMGGSKSAGCIQPTFVKIFNSDKESFFVIDQSVTGMFEKRVRLGF

SEQ ID NO: 14 - protein, 1359 aa, synthetic construct
MKEREYFLGLDMGTGSVGWAVTDTEYNLIKINRKRAWGSVLFETSKGAKERRVNRCARRRLKRQKERLDLLRELFEEEIQKVDSGFFLRMKESRYVYDDKRDENGVKPQLPYSLFVDENYTDVDYHRDFPTIYHLRKALMEEDRKFDVRLLYLAIAHILKNRGHFLANMGSDEVNLDLKESFKALLGKWNDMMADDDIMSVTAGSEQLEQIEKTLKDTRIVKSSKKQEIINIIGIADKRFKELASLIAGGKVSLSKLFDRKDYESLEINKISFDDASYEENEEYYAANLEDNYDIIACAKNVYDGMILSNILKGDESGFISAAKVKDYDKHGKDLNLLKRVILEEGIGEDKQRKILYKRVFGVTKNQDNNYSRYVGVVSTKGRKGVIEDKKCTRADFYNFIKKEILPEIKEGDNKEYIINEIEADSFMPKARVKENSVIPYQLHKKELKKILRNAEKYHPFLKETDETGKSVSEKIIMLLEFKIPYYVGPLNVSGSNAWAVRSSGKITPWNFEEKVNIEESAKNFIEKMTSKCTYLKNEDVLPMSSLTYEKFMVLNEINKIKINSEPISVELKQDIYHELFEKKLKVTVKRLIDYLKAEKGYADLKKEDISGIDIEIKSSLKSYHAFKEKFTGVNLSEKAKEDIIKDMTLFGAEPKLLKKRLTSKYPEYENQINSLIKSLKCKDWGRLSYKLLNGLAIDVPGQGMIGTVMYRLWNTNENFMQIIESSDSPYAKLIREENGEARKKGIDYSIVNDLYVSPAVKRQIWKALQVTDEIMHAMGKPPKRVFVEMAREEGEKKRSVTRKDRLIELYKSIKDEKALYDKLLKTDNDALRSDKLYLYYTQLGKCAYTGKKIEIDELMNNNKYDIDHIYPRSKTADDSLDNRVLVYKPVNEDKNDIYPLGKFDSGIYDRMRNDWLIWKQKGLISEEKYKRLTRTTELTSEELLGFVNRQLVETRQSTKAFAEALRYVIPEETEIVYSKAGNVSRFRQQYKILKVRDINDLHHAKDAYLNIVVGNVYHLRFTKDVRKYFNKNGTDRTYNLYKMFDKDVKCGLETAWKEGKDGTVIKVKETLKCDRVLVTRQTYEAGGKLFDVQPKKKGKGQIPLKSGKGNERLNNINLYGGYDSASITYFMLIEGRKKDRQFRYIVPVPLYLKNRIEADEKFAKEFFEDEYKLKDVKLIRKILMQTLMVLEGFKMRIAAKTDNRISFHNANQLQLEQKYYKPIKEIIKFLQERKERKGVTINVNSGITHEELINMYIMFKKKLSDSVYNEMLGKYCDVIENGTAEFKKLTLEEKSVQIYELLKFFRCTSELSDLSMVGGSKNAGTIRISINEVPKRKNLAIIYQSVTGIYEKIERINE

SEQ ID NO: 15 - protein, 1363 aa, synthetic construct
MKNAKNKNYYLSLDIGTDSVGYAATDENYNLLKFHGEPVWGATVFDAASLNTDRRTFRTARRRLDRRQQRIDLLQQLFAKEIGKIDPRFFIRMEESTLYPEDKADKYTLFNDKNFTDKEYHDKYHTIHHLIDELMKSNEPHDVRLVYLACAWLIAHRGHFLQNISVEKLSDIKDFDRIYENFIAYFDSKGFDKPWNKDSIDATKLAETLKKDSGITQKYKALCELIYNGKPPKEISDEFPFSKEGILKLLAGGTYELAKLFDNEDYAELTNKSVSLSMDDDKLAEIAAEIGDDYDLIENLRSIYDWSILVNILAAKNTISEAKIKVYEQHQKDLVFLKHVVKTYIPEKYDEIFRKTDCANYAAYSRHTDEPHGAKWGKNKVDFSDFLKKIIDKITPSEGDKAQFEDMKERLQFQKFLPKQKDSDNRVIPNQLYLFELKEILKNASTYLPFLNETDEDGISTKSKIESIFSFRIPYFVGPLNERSDKAWLVRKAEGKILPWNFEKIVDLEASENEFIKKLTNKCSYIPGEDVLPKDSLAYHKFEVLNEINNLKIDGEKISVELKQRIYNEIFMMNKKVTRKKIEQFLVKEGFIEKGREAALTGIDITIKSDLAPQHAFKKLMDSNTLTENEVEEIIQRSTYAEDKSRLSKWLEREFPKINEEDRKYICNIKIKDFGRLSRKFLCELQGINKETGEPCTILGALWNTNCNLMEILANDRFTFTEEIEELRKTYYSEHGDLKLEDRLDEMYISNAVKRPIYRALDIVSEITKAFGKPTKIFIEMARGGSKDKKRERTKSRKDQILELYDKFKNEDVVHLRKQLEEMGVSADNKLQGDKLFLYFMQMGKCMYTGKPIDIANLGSKLYDIDHIYPQSYVKDDSIINNKVLVLSEANGLKGDKYPIEESVRNQMRAFWNLLKEKEFISEEKFKRLTRSTPFTEDEKLGFINRQLTETSQSTKAVATLLKEKFKNTEIVYCKAGLTSEFRQEFDLFKSRLFNDLHHAVDAYLNIVTGNVYHTKFTKNFNVNTQYSIKTKALFTHPVICNGKIIWDGDKMLAKVKETASKNNAHFTKFAFFKKGGLFDQMPVPAAEGLIPRKKDLPTEKYGGYDGVSTSYLLLVRFYTSKKSEVMFYPVPLMLAEKFEKEDGFAEEYILSTLRTQKNNKIQKIEILLKGRKFKINSVLSLDGFRVAIAAASLKDGRMAFHPLMQFSHSLQTVFYIKKLEKLVEKTKENSKLIYDAEHDMVTVEENLKLYDIYLSKLQTIYSKRPGNGNIALDLANKKEVFSALPPIEQAKVLLQIHSLFCRNSFSGIDLSLIGLSKKTAIVRKSLSLSSWKSDYNDVRIIDSSASGLWEKKSENLLELLKV

SEQ ID NO: 16 - protein, 1384 aa, synthetic construct
MAKKDNKVLFKFNEDKMKNVKEYYLGLDMGVGSVGWAVTDTNYNVIKKSQKSLWGSRLFEEAETAAGRRTYRSSRRRLNRRNQRIKLLQEYFAPAISKIDPGFYIRLKDSFFYEEDKTEQQKNTLFNDSSFTDKDYHLAYPTIYHLRKELIDNPKYHDPRLVYLACAHILKNRGHFLYGAQKFNTEALLEESIKDFNELYYEYFDIKLFNDEKIYEIESAILEKNLSRSGRAKTLEGLLNDKDKRAKKYCNLLVGNLAKIEDLFPEELEIEESQSKPKFSEGNYDEPDTQDYLLENLNEEQLAIVDEAYKIYSAAILQDLLSNKSGHKFSTISEARIDTYNQHKKDLKLLKEVVKGIEKENPSAKGLYNKIFKENTKKYKNYVAYSGHTSSDDKKEKIGVEEKTSYEDFSKFLKNNLSKYEKQDERIEEIIEQLDLNNFLPKITTTDNGVIPYQLHLDELEKILDNAKKYIEELNEKKADEIKQIFTFRIPYYVGPFDTRSEFSWIKRESFESIRPWNFNEVVDLDLSSERFIKEMTNKCTYLIGEDVLAKNSILYSEYMIRNQLNTLNYVSPVTKDIKRFDHETIEYLYEKLFVENTSVRVTKKAIANTLKNYNSIFADITSDSIGGMDLEIPHKLKALQDFNRICSGKLNNKEIDKIVEKITVFPDDSEMVARFIRKEEFSDKLTEEEIKKLSRLRYTDWAPLSEKFLTGIKTELNNGRKYSIIDILRKNPLNPNSPLNLMQIINLKEFNFSELIEEHNLGETNDPYVVDEELLDSLRLSAPVRRSINQTLLVCEDIFKIMGGTPKKIFVEMTRSEGEKGKRTTSRKKQIEKLYESIKTDLKDWYSIWKDKLKSIDDSEYQAKSIYLYAMQAGRDMYSGQVIDEPRNLEAYDIDHIYPRSKTKDDSWNNLVLVSKKSNAMKGDKVLSEEIQNKNKDYWQMLLDKGFMSEEKYRRLTRKTELDGEELRSFVNRQIVETGQSTKAITTIFNRILPESKLVFVKANLVSDFRYNDGKKSKVISDLNFPKVRDLNSYHHAKDAYLNIVVGNVYDTKFTEGFFESLRNKEHPKYNLERIYDKNIADKNGELVWIAGENGTVATVKKFMNRNNIFVTYRTFKRTGKLYDVNLNKKGSGQYPIKTSDKRLMNLDKYGGYNGTKGSHYCLAKIKKGKKIEYKLLTVPMIFENRKSINGETLIEYYKNQGENIAEIVTDDIKINTILEIEENLYRIQSDHDKSRIISPEYCVAHYGLKEEKIIKDIERITLGKTIRNDINDKVLDDIYDGIRLKLNSEKLKKYSFYEELNNDMLDNKGIFNKLTIKEKCECIMKIVQIISGINQETDLRMINLKKTIGRKARSRTIKGNKLRILHQSPTGFYSSWEEVSLE

SEQ ID NO: 17 - protein, 1387 aa, synthetic construct
MNLRNCSGEYNIGLDMGTGSVGWAVADNDGQLFHFKKQPTWGSRLFESANTAAMARIPRSQRRRYIRRRWRLDLLQSLFQDEVEKVDPEFFIRLRQARLLEEDRAEGHSDYRWPLFNDTDFTEHEYYKLFPTIYHLRKWLMETDQQADIRLIYLAIHNIVKHRGNFLREDQKSLSAKTAKPDDALHAFFKALNDWCASRGYETVNDTASEIIRVFNDEEAAPSDKKKRIAALLCISLGDDSAANRKCNEALAAGMVGLKAEFKNVFGEFQAEKTAVYLSNDEDVEALREMCPDDSVDLFNRVCSVYSAYVLQELLSYAPGETISINMVKKYEQYGEDLALLKNLIREYARESYDNFFRGPKYPGTNIYDVSKVQGYTKYNLGTSKLSYDGFEKAVVDLLGKTSAVNDERYQSMVDAFEKQRFLRRLKTSDNGSIYYQLHFEELKAILKNQSRFYPFLIADEKKIESLVSFRIPYYVGPLTSRNAAIDQHGNKRFAWAERKPNQDNTPITPWNWDSVIDRNKSAEKFIKRMTGTCTYLQGEEVLPKCSLLYEEFCVLNELNGLRLTIDGDREYRLDAAQREGIVHDLFHCKRSVSYKQIEGWITREEGFEYPHVTGGQGASGLESKMGSYLFFCKEVFGIDELDPKDYAMVEEIILWNTLFEDRKILHEKLVEKYGRQAGGPLSEEQIKKICKKRFTGWGRLSKKFLTGLKVQTEAGPKSIMDVLREGDPNSDSRRGRAMVMMEVLRDENLGFQKMVDDFNKNYFEANGKLAEINELPGSPAIRRSLNQTIRIVDEIAKIAGHAPTNIFIEVTREDDERKKGRRTNRRYDELKNALERFKKEDPEVWHGICDTAPKDLNERLTLYFMQRGKCLYSGRPININQLSDTGLYEVDHIIPRAYIKDDSLENKALVYREENQRKTDALLIDSSIRQKMSDYWRMLHNAKLIGDKKYRNLLRSTIDEKAMKGFVARQLVETSQMVKIIQSMLKVRYPNTKIVPVKASISHNLREEAGFIKCREANDFHHAHDAYLALRMGLFIQKRHPGVYENPIGLTRVIQKYVRSQSEEFKRTHHFPGSAGFIVNSFMSSGFDKETGEVFKDDWDAEAEVEGIRRALNYRQCFISRMPYEDTGVFWDATIYSPRNQKKKPVLSLKNGLDPQKYGGYSREQFAYFFVYEARKPGKDEHLFCFAQVPVWLAMRIKGNQDALDSYAQKLAQSEGFEYIGIERAKILKKQLIEINGDRLIVTGIKEVRNGKELAFTSDELALISRITSQKELNESDNELLNEIWNRLVDCGNQIGWHLMAQLKLGGYNEKFSKIDSKSKSEVILGLVKIINATTNVVDLSLIGGKQHAGCMLLNYSNVLFDSNTDFYIVDQSVTGMFERRTRIGF

SEQ ID NO: 18 - protein, 1394 aa, synthetic construct
MNLRKASDYSVGLDLGTGSVGWCAVDNNGHLYSFKRKPTWGSRVYDSAAPAADARQFRALRRRYNRRRQRINLLQGLFSEEMNHVDPDFFIRLNQSQLLKEDRDETCKDYACPLFKTVADEKEYYKTYPTIYHLRAALMHANQKMDLRLVYLALHNIVKYRGNFLYQEYAHLSAKDAGLSEQSSNFLTSIEHFEDDRCISFTYNTAEIIHFLNNLKVTRAQNREEWQKLFVCDTSDDITKTQANAITKCIAQAIFGYQADFSALFRTEKEKSKFKLSQEEKVTAFEELCPTEFLPLFNALKAMYSAYLLTTIIKDSNGGTISNAKISQYDAYHNDLAKLKELIKRVLGKDDYDTFFKGVYYKNTKLYNKQKAEGYTAYNLGKLSYDDFAKELKKLIIKLEKSGVLSAEDDAWVRQIPTRLDNEEFLRRLRTSDNGSIPYQLHLEEMDAIIKNQGKYYPFLLKEKDKIESLITFRIPYYVGPLTLKNAARDAYGKPRFAWIQKKENEAHTRILPWNWEDVVDKHATAEAFIRRMTGKCTYLYAEDVLPKCSLLYQEFCAYNELNGARWTTDNDQFNRFSADYRESIYNDLFVMRKGKVTYKKIENWLEQQGELHPHVRGGQGENGLESTLSSYHFFKDLFEFEVLTELQRQVIEQIILWNTIFEDRTILNEKLNSRSFQMEFTAAFNNPLTADQIQKICKKRFTGWGKLSKKLLTGLFVDIDGERLTILDLMIHGDVTDGRKGRALIFQEIVTMEQFKEAISKTNEEALSKCIIDIDDLPCSPADKRTVNQALRVVEEIASIAACAPSRIFIEVTREEDTKNKGKRTDKRTSKLEMGLKKLRDSENTKAILAELSVHKNLDEKLTLYFAQNGKSLYSGTPLDINELSHYQVDHIIPQSYIKDDSIDNKALVLASENQRKSDSLLLEDSIRRKMSNTWNALFKAGLMSEKKLNNLKCSSITDRRLKSFINRQLVETSQICKYAMQLLKEKYPHCEIIPVKAGISSGIRHTWNIAKCREANDYHHAHDAYLACEVGRFIQLHYPKIYSNPTAYNKEVRGLIQSNIVHSASEGNGRYRLPGDSGWLTYSFAHKKTAAWDCDAERDRLLRYVDYPDCFVTRMAYIETGAFWKQTIYSPHNEKAKDLIPLKKHLDTNKYGGYSSKKYAIFFVYASQNSKGVKECHLSGLLIAKLAVATDNATGKIDMHRLIKLEEQLVAARGTSIQILQPIVFKNQMIEFGKRREIITGLKERRNAKELAFKQQHMRLLKKWNDDIQEEGRKTTEVIDEDAQLNEMFDLILGKADHCAPALHNKLLNIVGADVDDYARIEQKFAAISDKDTKKRVLFKIISNANAQENQIDLTAIEGSKHFGVISDWPKKFDIIEQSVTGMFEKRIHIGI

SEQ ID NO: 19 - protein, 1400 aa, synthetic construct
MNLRKASDYSVGLDLGTGSVGWCAVDNDGYLYSFKRKPTWGSRIYGSAAPAADARQFRSLRRRYDRRRQRLNLLQELFSEEMYHVDPDFFIRLNQSQLLKEDRDETCKDYACPLFKTAIDEKQYYKTYPTIYHLRAALMHANQKMDLRLVYLALHNIVKYRGNFLYQEYTHLSAKDAGLSEQSSNFLTSIEHFEDDRCISFTYDTAEIIHFLNNLKPTRAQNRDEWQRLFVCDTSDDITKTQANAITKCIAQAIFGYQADFSALFGTEKEKSKFTLSQEEKVTTFEELCPTEFLPLFNALKAMYSAYLLTTIIRGSNGGTISNAKIAQYNAYHDDLAKLKKLVKRILGKDKYYTFFQGVYYKNTKLYNKQKAEGYTAYNLGKLSYDDFAKDLKKLIEELRKNGVLSAEDDAWAQQIPTRLDNEEFLRRLRTSDNGSIPYQLHLEEMDAIIKNQGKYYPFLLKEKDKIESLITFRIPYYVGPLTLKNAARDAYGKTRFAWIQKKEGAEKKRILPWNWEDVVDKHATAEAFIRRMTGKCTYLYAEDVLPKCSLLYQEFCAYNELNGTRWTTDNDQYNRFSADYREGVYNDLFVRSKEKVTYKKIEHWLEQQGELHPHVKGGQGENGLESRLSSYHFFKDLLKFDVLTVQQEKVIEKIILWNTIFEDRAILKEKLKAQSFQAEFTAAFNNPLTAEQIQKICKKRFTGWGELSKKLLTGLSVDIDGERLTILDLLIHGDVTDGRAGRALIFQEIVTMKQFKEAIVKANEKALSTCVIGINDLPCSPADKRTVNQALRVVDEIASIASCAPSRIFIEVTREEDTKNKGKRTDKRTSKLEMGLKKFRDSEDTKAILAELSAHKNLDEKLTLYFAQNGKSLYSGTPLDINDLSHYQVDHIIPQSYIKDDSIDNKALVLASENQRKSDSLLLDDSIRRKMSNTWNALFKAGLMSEKKFNNLKCSSITDRRLKSFINRQLVETSQICKYAMQLFKAKYPHCEVIPVKAGISSGIRYTWNIAKCREANDYHHAHDAYLACEVGRFIQLHYPKIYSNPTAYNKEVRGLIQSNIVHSGSEGNGRYRLPGDSGWLTYSFAHKKTAAWDCDAERDRLLKYVDYPDCHITRMAYIETGAFWDQTLYSPHAGKKDLIPLKKHLDTHKYGGYSSKQYALFFVYSLQKKKGNKEYCLSGLPIATLAEATHNTTGKIDMDRLVQLEEQLIQLEKQLITTHHAPIQIVQPIVYKNQLIEFKGRREIITGKKERRNACELAFKQQHMRLLKMWNGDLKGKYREKKEDVDEDCLLNEMFDLILEKTSHYAPMLHNRLLDIVNANANDYSRIEIIFAAIKDQNVKKSVLFNVISNANASKNMIDLTAIGGSANFGVISDKPQQFDIIEQSVTGMFEKRIHIGV

SEQ ID NO: 20 - protein, 1402 aa, synthetic construct
MKKIFSQQGQNYYLGLDIGTDSVGWAVTDLNYKLLRVNNKNLWGVRLFDEAQQASARRLQRESRRRLERRRLRVNLLQQIFAPAINAKDSNFFARLDDSNLYGEDKREKTKFSLFSDTNFTDIDFHKKYKTVYHLRAAMMSEANPDPRMVYLALHHIVKYRGHFLIEGESMNAVENIAMPIEEIKRYLADRDESNCNDCFDLSKTDSFRELLVQKVGKTTKANSLAECFSVEKHNKKFLTVLKLVAGCSVSVKDLPVECDDEKLKICFDGDWENQETVLREALQDDYVLIENAKLLFDYSQFKAILGNHKYLSQGMAEKYKKHEDDLKALKYVLRKYFSKEKYDDMFRNASDNNHTNYTAYSGRVSFGRKNGKKVVLEVKSNSREYDDFIKYVKEVLSSSETAMQDEVSKRILTDIEKKEFMPKQVSKNNATLPYQLNLAELDAILENASKYSEYAFLNEKDEDGISARVKIRSLLTFRMPYYVGPVNNSSGKYWIVKKDDGRIMPWNYEQKIDLEQTERNFIERMTNACSYFPEEKVLPKCSLLYEEYVFLNIVNKIKINGEPIPVSLKQRLSDYYAETGANKLSKKFLKRWLIEENVAQNDDDLQIEGFDDGATVHRRTFYQFVQIFGSKQAVLENLKDIEEIVKYATISGSEKSNLEKWLVKNYKYLQKEQIKRIKGLTCKGWGRCSQKFLITKFGTNPETGEVNSLSVMDVLRDTTLNFMELWNDEVYGFSKAFDSENNKSYEGISYSIVGELYCSPAVKKQIWQALTVVKELRGILGCAPSKIFVEVARGSDSKKDKLEERKRTTSRYEQLKKVFEDIRRQNDASLAEDVYDKFVKVGERKEKLQNQKLYLYFLQNGLDAYTGEPIDYNHLELYDKDHIYPRSKVKDDSIHNNLVLTYRPQNAVKRDDYPISEKIRNNPKVKALWKTLRAQGLMTEEKYKRLTRTTELRDDEMADFINRQLVETRQSTKEVIGVLKRVFADSEIVWSKASNVSDFRALPKRIGEVSVPRFVKCRELNDLHHAKDAYLNIVVGNTFNVRYGHNAKYWVKEHPTEKLTSSAKIYECDVKTQKVTAWIAGDNGTMAQVEKTMRSNAVLFTRESKVAKGALFNATIEKKDEKGEKNLVPLKNCSSNCGKRAKMSQTSKYGGYNSESRTYYMLVKYVERKERKKGTVEKVKYKFLGVTAKDAHMLTDDASRVEYCENFGLAEPIILLDKIKIHTMFEFEGTRLTLAGMTGNRLVWRLAQQNVQDEETERYLKKVINVLEKRKKDADYKICDKDGVSEEQNLILYNSVVDTLLSPKYAGSGSLVSFAKKLSATNLMDKFKELSVEKQCVVLGEICKVLQCNALASDLSLLGEGKTCGKILTQSTLDNLDEISVVHRSVSGLFEKKIPLYVFDK

SEQ ID NO: 21 - protein, 1420 aa, synthetic construct
MNEKRPYYIGLDCGTNSVGWAATDEKYHLLKGTRRIKNDKGLKTKKQTLWGFRLFDEANTAAERRVQRSTRRRGARAKNRLKLLRMLFRDEIAEVDPGFYQRLKESFYYEEDKRLRRNSKNTLFNDQNFTDRDFHAEYPTIWHLRQSIIDPKNKDKKFDIRLYFLAIQHILKHRGHFLLQGNIGDGGADFLPLFDAFRDEAERLGCRIADVPNEVGALLMKESSKTDKKKDLKNILYLEGDELDEDAPKGQAELAGLLVGSKVNLKKIFAIEDEEKFPYSFAEGVFEDKILDIEQAIGAENLDLVYAAKNIYDYVVLHNLLGKHKMISDAMVVNYELHEEDLGKLKKIFKPHKELYHKLFKTELYDEKFPSYDAYIGKAYTQDKSGRKSSKSINQEDFNKHLHKLLTEIKPKTSPDLLPLVDELLERTETGEKSTLSFLLPKQRGQAKGTIPMQLHANELNIILEKLQRDYPSFAVEVAGEKSEYNTKAKKILKIHSFRIPYYCGPIVKRKYDDNGKLVPKGKSQFSWADEEISELVYPWNFDELVNKDGRAQNFIRRMTNECTYLLGEDVLPKNSLIYQKFMVLNELNNLKINNQRIDNRLKQQIFECGYEKGELKGDITLKKLERWCKDNSLIGNNDELSGTSEVKNLPKYQTYQDFCRILGDDFGQKYTQTKLEKIIELITILGDEKDMLGRSIQRELDCDSELAKKLSKLSYKDWGRMSAKFLDGIVVNNHTILDYLWEDNKNLMELLGQEVGFGKVVEQYNDTKLPASAKINYQDVVKLYCSPAVKRSVWQTIKIVNELVKNIGCAPAKIFLEVTRGEDPKSKGKYTLARKRDLETKFKAVKTDNARAILEQLEGFEDRDLQSKKLFLYFSQMGKCAYSGEPINLEDLNNSQLYDIDHIYPRSKTKDDSITRNLVLVKASLNREKTNTYPISESIRGKMRGMWAAWLRAGLITKEKYERLVRSTPLTDDELGGFIARQLVETSQSVKAIRDLLSRIYPATKIVMVKAGQVSEFRHLMGGDKKDKTGNICQKGKYEFIKVRDLNDLHHAKDAYLNIVVGNVMHETFTDNPYEWIKKREGKEYSIRPERIFRESQTYQLSDGRQTSYPKVRGWDFAESTKIVSDTMKRNDVIWARMNYVESKEISDLQLVGKGGKSENLLRIKRQDRLDPKKYGGYNSLKGAHFALIEAKNKKGEVERRLIQIPIIARNDVEKYVNENYPGAQVIISVIKIKSKLKIDHIPICIMNKDSESKNGYCHALQALFPANHNYYLKKISAVVKKDQLARSNYEISERDEVNIEGNLAIYDLFCRKLNLYSGLPELASVIPKILSSKEKFARLDLKQQCLTLSQMLNILSCGPQNAKLGNIGCGDNAGRIRISNDKLFKFTELYLVNQSPTGLYEEIIDLKTVQPKKSWKAA

SEQ ID NO: 22 - protein, 1426 aa, synthetic construct
MKEKQPYYIGLDCGTSSVGWAVTDETYRLLKGTHRIKSDNSTKTKRQTLWGFRLFDEAETAVERRTHRSARRRGERAKTRLKLLRMLFHDEIAKVDPEFYQRLKESFYYEEDKNLQKKSKNTLFNDSNFTDKDFHKKYPTIWHLRQAIINSDDSQHFDIRLYFLAIQHILKHRGHFLLSGSVGDGGIDFENLFESFRTEAERVGYDIADIPEEVENILAKKASKTDKKKELKEILYLEGDDLGEDVPKGQAELAGLLVGSKVDLKKIFSAEDDEKFPYSFNEGVFEEKLPEIEQAIGPDNLDLIFASKNIYDYIILHNLLGEHKMISDAMVSNYDLHQSDLKKLKQVFKPHPEIYTQLFKDKKHGTYDKKSNRFDANKNSSYGVYAGRDYQAEGDRNGHITTSQEDFNKYLYKLLEEIKPKSLPELTSLIDELLDRADTSEKSISPLLLPKQRGQTKGTIPMQLHANELGLILEKLQRDFPSFAEIVSGEDESYNTKAKKIAKIHEFRIPYYCGPLVTSRKSQFSWADKEILELIYPWNFNYVMGKTGQIDSRANAFIRRMTNECTYLVGEDVLPKCSLTYQKYMVLNELNSLKVNGHRIDNELKQKIFERGYKGSEIKGNITLKKLEKWCKDNSLIGSNDGLSGANEVKVLPKYQTYQDFQRILGIDFEKKYALDKLEKVVEAITVLGEEKTMLKKNIERELGCDDKTATLLSKLSYKDWGRMSAKFLDGITIKNRTILNYLWEDNKNLMELLGQEVGFSQIADEYNSTKRPASTKVSYRDVDGLYCSPAVKRSVWQTIKIVNELTKNLGYAPKKIFLEVTRGEDEKSKGKYTLARKKDLEAKLKAIKTEDAEAILKELNSGKYEDRDLQSKKLFLYFSQMGKCAYSGEPIDLEELNNSQIYDIDHIYPRSKTKDDSITRNLVLVKASLNREKTNTYPISDSIRSKMHGVWSIWYQKGLITKEKYERLIRVAPLTDDELGGFVARQLVETSQSIKAIRDLLKRAYPETKIIMVKAGQVSEFRHLMSSDKKDRDGNVYERGKYEFIKVRDINDLHHAKDAYLNIVVGNVMQETFTDNPSEWIKQRDGKEYSIRPEKLFRASQKYQKANGEETIYPEVRGWNFADSIEIVSNTMKRNDVIWTRMNYIESKEISDLQLVGKGENSDGLLRIKQQKRLNPKKYGGYNSLKGAHFALIECRDKKGNIQRRIVQIPIIVEDNIEKYVIESYNDAKVILPVIKYKSLIKINGFPMHISRKGGEVAIGFYHAVQAFVPSKDMKYLKKLVNFSSKYKQMHDKNEVNMEKEPIDKGCNEQLFKIFLKKLKAYRNMPELGGKINEIEDCKTDFDNLNLRDQSLVLVEFLKILSCGPETANLLSFVPKAGAVGKGKFNDNILNYDSSFLINQSPTGLYEEVVDLKTVQSKAQKGKES

SEQ ID NO: 23 - protein, 1439 aa, synthetic construct
MKIFVSIDQGAKNTGLVLAEVDSNGQLQNLEGNVVSINENEFKTSQLDRRTKRHQRRRYKRRKLAKRLLRLILEKEFGWNFSKKCIKQKEFIFGLLNRRGFSYIVEDLDVETLNNEDFIDFIVKLFPDQLNKDEKLTEQIEKNYSNPEWFKSILDNPNSKFVSGKNKNSNEQTLEGYCKDKNLKYSKELERFYNKFIGTISQFYDEMSGGAKHRKKYFEEIKTVIYNSNPLDEIFRGSKIDEKKFFKIVAHISNFPLRVLRKYFNDKKMKDGGYWDDKRLKKIFLREVRSWHTSGNNELKKRRKRLISLLTDPNKGILEFWFELDPIETIPPYEDMNNRNIPLCQTLYLDPEKLNEKFKGWKAILNKLLEEEKDSKIKEGLLENKWDSIEKHKIFYHDLYKKCHLKLKPKISKDDLLARTLQRFFDRVRDKDPYKFRLIALSKKVDSDEYKDAINNLKKVICENEIEILKGIAKTYYAEQENAKKGLWDEKNSILKKCNLHTKHKINLSHIIIGDILDVRMSPKETEDFYNFLKNTRIERKTLIGIASECSEILKKEGNTLRASLETVLYYNNNERELDKKQEYLFKIYELVEKGAKEIGNYLGKNNSSRYADIWSFAQIYNVLEGDRHGFSKICEICHEENALRSSVMNEEGATFTRLFADSVRPFDGVVARLISKQADVISGLIIKKIGSLKVNNDEEINISLIAEQNEFLFEEELSSLKGKTSDKDKSEYDSIFNNKLERIKSFNTYCPYTGEKIGDNGDIDHILPRSWTKRVYGAIFNDEMNLIYSSTRGNRESKANRPDGLWDFENLSDSFLSELYDGITDRETIKNTINNTLEKLGILNGERKDKIVFLRLDKDTQRDLKVALFTPEFRDKLIPYLNNSLSAKVNGTQAYLLKLIIKRLREKYPNLKATISRVDSSLIQKFRNDISKEDPALSKNRENQSLYSHTVDASIALFFNTEESDFKRCLPPGIKIIEAKARSQIHKIKKGDFYSTSVFKDGIYGEKFVPVILFKEKLYFGFDTKNCVEILNEKETIFDLLKPYLRYRNDNKKIVKAFEKSFEDWKNISKNKFLRFFVDKIAAFEFFEKVAKQPSDDMEKVTFHLLEGLRYTTQKIEIMSLLIDSNGKKYKTKEKILSKENFNIEINISPLKIENEDIKIEGSLTFPARTFLEKIVDSDEIKNKLGNDVKNKEEDFKSINKFLKNLYGRKNESDPRVKARKVFSVDIIKNPSGGFRIKRKTPDGTIYQLVEIKDRATIGFEVRDGKIDKNSAILHPVLYNDRNIVPVGALYKESPKNSVLMDDWREITLEDDEKKFINRLWVCPGTKSRSYYRIELLTEQFKKSLFNNITSFSISQDKQDEFYKILPLKLKFDLDKIDFLKDDKIRKILVGPRSSEKNNIKQGSMIVFEATSEHITLEYEANGFMPEEAQRRYLEVKK

SEQ ID NO: 24 - protein, 1453 aa, synthetic construct
MNSKLICPIAIDLGAKNTGIVSGSITDKAEFSFKGAVISVDDKTSWSMTDRTARRHQRRGIKRRKMAKRLFWLILLHEYEIKYKNLTVRQQEAFNGLFNRRGFTFASGGDENKERDEIIKSSEIEIINIFENKVPELFADKKGDLLDRISQNQKLPESIPFFEHKLDKSVFRDWAKESNLIEDSEIEELSKSFEKTYKALKDYYQSALREQMGSKHRREYLVEIKKDIDTYFKNEDLSFSRLFEKKVDSEKLYRLIGNISNLQLRVLRKYFNQPEGGSKEKLHIDIWDKEKLRILIWRWIESWHVDKNEGEIRQYRSEMQSNRNLKKGGNIISFLTEISPEKTIPPYEDQNNRRPPECSSMHLDAEKLDKLFPGWKELCCVIHANFKTDIDMGKIYSDDTCREVNIENSKELCLLLQRYLDRSMRLDSLEIRKIVSKNEKERKNYISDKIESVLGNNLTKLLYFDLAPKYYSEIQDARNGLWDELNHNSILKRCGKNPPHKNNISHLLVGNILQHDFDEKSYMKFIDECWKTPITGRTTLSSMCVKIEDIRKRYGNSFNEFYKELLVSIEIHNKNVKNEKKIIEFKPSDGIEQDIYDVYKRIKPASEVISKYLCHDSSVSEKYSNPFTLAQLSNIIDKDIHGFSKDCKICSYENKWRMQLNKYTTEDKTDYCANAVRLSSDTVRPFDGMMARILDNQAEEIVKLKIKEIDEIIKTNSKSDLVIPVCIEQNSFNFTSDLADIKRSSKRKDLLKRKEASQKREEEYFTNKEQRIIYASKGLCPYTGEQLDVKGEIDHIIPRAKTKKISNTIIDHEANLIYCSRKGNQIKKDKEYSLSNLNAKYLNNLYGTANTKDIETQIETSIEKIKKLRQTFVFTDLSENEQRDFRHAFFCDKLKDSLLDYLANQIKARVNGTQAFFAKLIIRKLRKHLESKGLRAEFIVIKIPSSKEGGVSFIRKKIAELRADIAKQPIQPIYSHIVDAACVLYLSFNENEIFNKISAPVVFKTTDDISLFEEILPKSFSIEKGEKRKIYERETKIDFSSVQIFKDGIFAEHFVPVIINAEGLSFGFNLKNRSICVKNAELWFNEIKDYLNLKDIYRDKTIEELVVLSVNGFIQISFDKTKCLELLQKASRDVSLYSENESKVKILEGLRYTTARMNLEDIVFLKNNKKITGIVEALKTDLFTFKVNFKSLGKDFGSFHELQLILPSINEAKDFHTLIKRTCDITDGEIDYSELFIKIYDEKFNNSQQSISCRKQKTRKTSLPVIAAPSGGFRLRRKNKDDSSIYQLVASNAYVSGFDENLKNISIAKHFSKSRNIALISEFNNFENIKTSISLNQWITVEPFEPYIDIIDEIQACPGTKSRFYIVLKLKNETFLRDMVTKEYLNSISGNILNVYGVMKKNDYKSDFFKGSLDKPRETIFIKELSDDYIKLRYEAEGRKIKDLYLKSLKNGG

SEQ ID NO: 25 - protein, 1059 aa, synthetic construct
MSTMSYILGLDLGVASVGWSVIEIDENEMPIRLVDLGVRTFEKAEVPKTGESLAKSRREARSIRRLIARRVRRLLLAKKALLEEGILTQNDFLTKSIIKDLPINAWELRAKGLDHKLTSKEWATVLLHLVKHRGYLSQRKNESDTADKQLGALLSGVKENHTLLQENKYRTPAELAICKFEKEEGHIRNQNGEYIHTFDRLDLQAELHLLFEKQRQFNNPYASAKLEEKMDYLLMYQKPALSGEAILKMLGKCSFETQEYKCAKNTYSAERFIWLTKLNNLRILTQGSERGLTESERALLLNQPYQKAKLTYTQVRNILELSESEIFKGLRYGNVEDKKMIEKETLMELKAFHQIRKVLEKANLKTEWQGLATKPELLDEIGTIFSLYKTDADITAQLQDKISAPILNALLSGINFDKFINLSLVALSKILPLMEQGQRYDEACTSIYGDHYGVKTKEEHLFLPSIDKDEIRNPVVLRCLSQTRKIINAVIRLYGSPARIHIETGREVGKSFKERQKIEKNQLENKAKKERAIKEFKDLFPYFIGEPKSKDILKMRLYNEQQGKCLYSGKTIDINRLLEKGYVEIDHALPFSRTWDDSFNNKVLVLANENQNKANQTPYEWFDGKNNTTKWQQFVALVWGSHFNYHKKQHLLLKNLPEGFMKRNLNDTRYVARYLMNFINDHIQLTGKGKRRVFASNGQITALLRARWGLMKVRGDNDRHHALDAIVVACTTPSMQNKITDFVRSKEMNIFSGEFIDRNTGEIKQIHFPEPWNYFRNEVMIRVFSHDPLLELEQQLPSRPEARHQYVTPLFVSRMPTRKMTGQGHLETIKSAKRLAENESVQRIALTSLKLNTLENMANKDKEKALYQALKERLEQFNNDPVKAFAEPFYKKGGQQVKKIRVKQIQKTGVIVHQGNGVADNASMVRVDVFEKANKFYLVPIYTWQVAKGILPNKAAIANKNEDEWQEMDESFTFKFSIHPNDLIKVTTKKEVYFGYYVAMDRHTAAINIREPDLERSKGKDGLHRGIGVKTALSFEKYDIDPLGKNIRPCQPKARQPIR

SEQ ID NO: 26 - protein, 1335 aa, synthetic construct
MEQKDYFIGIDAGTSSVGWAVTDPAYHVIKKHGTALWGVRLFEEAATAEKRRMARSARRNRDRKVFRLKLLRELFAEEISKVDPAFYLRLDESKYWEKKVDTKYCLFSDPQFNDRDYHRQYPTIYHLRDELMKSDAPHDVRLVYLAVSHLIKHRGHFFLQMDEDVSQPEFGDGWTALVEDLETILGVHISCCDLDKLQQVLCDKMTVREKQKQLKKLITVSDAPDMPPFTCIPDLLSGKTCDVSKSFGIMLEGDEKNALKVSLSGEDLSDEEKIETYQKHLEEKLQILEDLKVLYDWGILVHILHGSASISEAKVKSYEKHKSDLKKLQRLIRREYREKYAEVFRQNKKKLDNYSAYTGHCKGVNERYRCNREAFYKYLQKLLKSSTSADAKEIMSEIEIGTFLPMQRTNENSVIPYQMNLAELKKILDQAAGYLPFLNEKDEAGLTVREKVESLLTFRVPYYVGPLDHHMAKEGTHWAVKKHPEQRVYPWNFEEVVDLEKSAERFMEQLTNTCTYLIGETVLPKDSVAYARFMVLNELNNVTIYGHRLSVDVKQQVFLELFCGKNRVTRKAFLEFLRKEGLIHKGEEEAVGGFDGEFKASLKVWNRLRAIFGEDLPDTEQMDQMILSVLLLKQEPEMLKSRITRLYPSITPSQLKSVCKLPCSGWGRFSREFLTGLKADVPQYGGSDWSILDALWNTDCNLMQLLSGDMPYQALIEAHNRELMGDVKLDYQTVSGLSAPPAVRRTVWQTLRIVQEITHIMGGAPKKIFVEMARGSDGSKQKVSRKKQLSDLYQKMGEEGAEWCEKLDQYEDSRLRQDKLYLYFTQMGRCMYTGEPIDLHALLNDAGNQIYDIDHIYPRSKVKDDSLDNRVLVKKTVNVDKGDKYPIQSEIRQAQTSWWRNLRKCGLISEIKLDRLTRSTGFSEDELAGFISRQLVETRQSTKLLAEILSKALPESRIVYVKAGNVSSFRQENNIVKVRDLNDLHHAKDAYLNIVVGNVYDVKFTANPKRFLRSGEPYSMKTDVLFGHTIRRGNQLAWTPDYLPEVKKTCRRNPILVTRMAVRRNSGRSGGLFDQNPVRGGTIPLKGDPRMQDTKRYGGYDKETGAYMFLVEHGEPGKRIRSMEPMYLRYAQRIQDNSDDLAIYCTEVLKLKDPNIIVPEIKFYTLMESSGFRFWLTGRGGDQILGIQGFQLVLDETSESYLKKVLKGCQKVMSAKGQIELEEKADRVTKEENKTLYDVLLEKMQLPIYRSRPASQVQTVSAGRECFAALTLTEQCVALSNLVQLFRGNGQADLTGIGGSKTAGSMKFSKKTGADFKIIYQSVTGFYSHEESFSI

SEQ ID NO: 27 - protein, 1416 aa, synthetic construct
MAKYFLGLDIGTNSCGWAVTDEEYNLIRRKGKDLWGVRLFEGAVTAEERRQNRTNRRRLDRKKLELSWARDVFAEEIAKVDKDFLTRMKYSNLWAEDKIKMSNSLKSKDSLFHGQVDGRDYTDKDYYIDYPTIYHLRKELTQEPAKDIRLLYLAVHNIIKHRGHFLYGGNFGDNSNLLVSFNEALDCYKKIIDQEDCLLHVKKLEEGDIAEILDCIKSKSGMRLTKAKFNEIFDAKTKSQKMLVSAFVDGKINLEQLFETKLEEGKLDFNDEDIEIKINGLENVLSDEQVSLLYKIQEIYSLLQLKSILADHEYICEAMVESFEEHHRQLEQFKKFIKKYYQKEYFNIFRNPRDKDSDKNVGYAQYVNCNLTNGSKQVVDLNVSNRSKEEFYKYIKKILSFTPNDCQDLEQFENERNYYLSLIQEDRFLPKQRTKSNSVFPNKLYEKELKQILQISGKKFEFLNEIDKTCGLTNAQKLLQILTFRVPYFVGPIGQNSNGQNHGWAEKITNLDYKPWTLNKIVDFDMAEDAFIGKMTNKCTYLKDKDVLPKNSIIYSKYRVLNELNKLKINGNDISVELKQNLFNELFCNFAKVSSKDVKKFLIKEGLFSADEINDIQLSGIDREFANNFSSYSKLASNSLFGKDFIDEHLIEIEKIIKYHTVISDKNRLDKRLRREFSGIFNEEQFKILKGLNFKDWGSLSYEFLCGLKFVNRETGEITSILDEMWNTNQNLQQILNNGSYTLSECLTKSNEKSLKNLVYQDVENLYCSPAVKRGIWQSVKLIREIVEVMGEMPEKVFVEVTREDGEKGDSGRKSSRKEKLEKLYNSKDFKKNVFISSQEIAQLLKELNDKDVTSLRSEKLFLYFLQSGKCMYSGQTIDINDIYNDNLYDVDHIIPQSIIKDDSIDNKVLVKRQLNAQKLDTYPVPYEFISKQKGFWKVLLDNGFISKEKYDRLVRTSPLTEDDLGQFIARQLVETNQTVKAVIDFLKVSMEDDRKVVYNKAKLVSEFRQIFSITKCRDINDLHHAQDAYLNIVVGNIINNKFTDDPRNFYKQKKFMPLIYNKEEKITESNNIKKVFTGVVFSSASTRPVWSATRDINKIKKICQRTSPLISKMSFANFNGAFYKETVHKSNKNNKKTEASVSLKGDKSNPIFDTQKYGGYNNLNNAYFMLVESKDKKGKTIKTIEAVPILILIKNMGKPNLNENILKYISETRGLNDAKILIDKINFQSTFLIGRGRYVLGGKSDNVILLHNANQMFFDDECKKYIKAISKYFRLKADKIESSLEQDDEKIALSPASKKENKEIYLTKEDNLKLYEKFIEKLSCSTYEGMQLATVLLPKLKEKKELFISLSVQDQVQVLHEITKRCSCGAGFADLSKLKDGTSVGKISINKNITDKNIILIKNSVSGLFEQRIKL

SEQ ID NO: 28 - protein, 1331 aa, synthetic construct
MKKYNIGLDIGTTSVGWAVVEKENFKVMKKGRKKMWGVRLFDEATSAAERRGYRNTRRRYDRRRKRIQLLQKEFQKEMNLVDPNFYQKLKEAFFHECDIFNKTTIISQEEKEQMKTYYKLYPTIYHLRNELVHTTEKIDIRLVYLAIHHIVKYRGNFLYEGAKFNTSQLQLNEKINELFHVIDITNGTIEHHSEMIELLDSLKLEEALLLENKNEQRIYIKEALQNYFSKNFISEFTKMILGDNFSVAKLFDVELDPDIKLNFKGSDYDEKFAQLEKEIGNQIDILKEMKSLYDILFLKKLLEGEDEGNISAIMVKRYQTHKQDLNLLKSVLKQKKETYKQVFKSNQKLCLYEQYCHNHITYDEFTKKILNFLEKEDISDNSILLKKRIETGKFLPRITNIENGKFPYQLNYSELISIIENQGIYYPFLKEKENNTYKLIQLLQFRIPYYVGPLNNTTNTLKKNSNAWAIKKENVACITPYNFKKVMDLDASAEEFILRMIGKCTYLLKEKALPEASILYSKFKVLNELKQIRINGRKLELEIQQKIYKDFFLKNSGNLTDNRFKTFLYQMPEMRMYDDLTITGYSADMKFANTMQSYIDFFGENGIFEGTSYDEKDAEQLISWITIFEDQEILKRKIEAHYSLNETKINCLLKKKYKGWSNLSKRLLITKYYQNSNAITKQSILDLMETTEENFMQILYNRKYKFQDMIAQINGNEMSQKLNYEVVSELATSPAVKKGIYQALLLVEEIISIMGYEPNQITIEMARGDEKKERKSDRKKWIENLFTKCKQQITNYNQLKKELDRFESIDSQKLFLYFIQEGKSLYSGTPLDIEKLNSYEIDHIIPRTLWKDDSIDNKALVLKKENQEKAAAFVLPSKFRNDAMRKWWDHLKLNGLISSKKYHNLCRSKYTIEDIEGFINRQLVETRQITKNVANIIQKYHPDSKLIYIPASLSHNYREKFELFKFREINNFHHAHDAYLAAVLGEYKVSYLKEAMDYEQLKELTTQWMNHKNYKELNYGYVINSLDNKFPRYDLNGEIVFHPIDFNQTVKNTLYQNDVIISKKTEMKTGKFYKETIHSKRAKGNKLSLKKGLDPKLYGGYQDIEVAYTILVYYQNQYKLVGIPILIYKQAQKNTDIIMEYVKEHLKLKENDSCTLIKDKIFFNTLFLYKGQYVYLRGYSTESKGCEIANATELKIPRKKMEQWKYTLNYVLNDKKVPNNLEELLTEDKIEAQMNEIIQWLLSKQEYYPLYTSAIEKIKTVFNEINLSFEEQKRVIKELFILYGTSRNANLSFIENGGLSDRIGRLSGKNVNHGIIFYRSISGLKERYYEF

SEQ ID NO: 29 - protein, 1089 aa, synthetic construct
MKQLVLGLDIGITSVGYGIIDIENNEIVDCGVRLFKEGSAAENETRREKRGSRRLKSRKVNRIQDMENLLKELGIYENCNLIHNNPYDLRIKGLSEKLTNKELTRVCLHYAKRRGSSLDMVEDDETKAKELGETKKILQENDILLKQGYYVCQVQKMNEQKYGKIHGNYNNFRTSDYLKEAKQLLSIQGLKEENIEKILNIIQRKRQYYEGPGSLKSPTIYGRFIEEDGRIIKIDLIEKMRGHCSIYPEELRAPKMSYSAELFNFLNDLNNLKIDEEKITPEQKQEIISIIQTKKNITPLQLSKFLGVEIEKISGFRIDKKDKPILTEFKGFKIIAKVLEKNNEKELVKDVKFVDSISEILTRTKDIQERIESIEKLNDNLSKECIYSLANITGIRGYHSLSLKAIYEMNEELLNTEMNQMQILQSSKKLEQKINQKGKKNIQEDNTAILSPVAKRAIREAIKVVNAARKRYGEFDSIVVETTRDKNSKEQKKRIDDAQKYFKKRREEVDEVVNGRPLNAKTREKIRLYMDQDGKCAYSLEPIDLNLIMNDPTAYEIDHIIPISISLDDSFNNKVLVRRKANQDKGNETPYNAIKQGKIKNKNLKSVSIQEYQAYVLNLRKENKISNKKKEYLLSQKDYTKLDVRKEFVNRNLIDTSYANRVVFNTLEDYFKQNEIDTKVHTIRGAATSAFRKKVNLQKVREEDHSHHAIDALIVASIKKLNLLNKLLDVKNIKDVYDDETGEYLPMDDNSYFDPKYMNFINQLKDVKITKFSHKIDTKPNRQIADDTIYSTRIIEGEEKLIKKYGDIYDPKFDKLTNDILNESYQNKYLMAIHDSKTFDKFINIVQDHYNTYKDDSKIYTLDKGKIKLKGDNPLFLYKNEHGFVTKYSKKNNGPAITQMKYVDCTLGNRIDITSNYKIKDDKKVVLQQISPYRTDFYLDEDGHYQFVTVRYSNIKWKATQQSYIIDKEWYKNAKKQKGIQENAKFCFSMHHDELIGFIKEDGEKLIYNDEHNLINIMKEHNGKDYEILKFTATNNEGKNIVEVKPIYKYTSDRIKPLINKKIIKLAKFATDPLGNLYEVKDSKLKLEL

SEQ ID NO: 30 - protein, 1355 aa, synthetic construct
MEEKKKYNIGLDIGTSSVGWAVVESGTQKIIKKGTKKSRKSLWGVRMFEEASTAAERRLYRSSRRRYDRRRNRIKRLQNEFESEISKVDKDFFQKLRESKYHKNDEQNKKIVLSDYEKNKIKEYNENYKTIYHLRSRLIHDSSQEDIRLVYLAIHHIIKYRGNFLYDTKEFNVNHLNLVNSLKICFASLSDFFSNLNFSENYEEVIDFEKLANILMKSTKNDIRISIKQLLEGICENKKFSTEFGKLVVGNKFSLKNLFLLEELETDMTISFNGTDYEDKYNELEELLGDKIEVLNALKELYDIIFLKSLFKDSDTLLLSDLMVKRYNLHKEDLRFLKQMLRNTRDLYNQVFRTSKETCLYELYIHNQMTYEEFVNKLQKIMSKVFILNIDEQMEQKYKKEVQPRIENGGFLPKITDCDNGKYPYQLHKEELIKIIENQGKYYPFLLDKVNGEYKLLKLLEFNIPYYVGPLVTEDKSPFAWMERKKDGVKITPYNFDEVVDKEATAEKFIKRMISHCTYLLNEYALPNHSILYSKFKVMNELKQIKINNQKLDNHLTQKIITELFMKTNGSITDKRFKEYLYTLNEFDMFMGDIEIKGYSADHKFANNMQSYVDFFGENGIFNSTSYTVEDAEKIIEWITIFKEKDILEKKIRDAYPDLLDNQVKMALSRKYSGWGRLSRKLLTGLFIKDKKSDVPKNIMDFMQETNENFMQIINNEHYKFQKLIDENNLIKETKKINYDLVKDLVTSPSTKKAIYQSLKIIEELVNYMGYEPENIMIEMARGGGKKERTIDRKKYIETLYKNLESNKATTYFTNFEVTKEELKKIEKIDSQKLFLYFIQEGKCLYSGEPINIEDLSNCEIDHILPRTLIKDDSIDNKALVYRNCNQKKAASFVLPPEYRNNHRKKWWNHLKENGLMTEKKFYRLTREFYTDEDIQNFINRQLVETRQITKHVANIIKSLYKKTKVIYLKAELSHHYREKFALFKFREINDYHHAHDAYLAAVLGEYKEKYLKRNVNFEMIKEMNYQLRMSGDRNQLKYGYFINCLDKNVNDIVIEMCKSMIDDSTGELLFDVVEFNKRIEDALYRNDILVTRKTEIRNGKFFKETIYPKKVGRIKIKENMPTHLYGGYSNMQTAYLVLIKYGKKVKLIGIPVDIHLKSRKDSTIKFNFIKEHLDVDTFQILKDHIPYESFIDYKGQKVYIKGYSVANKNCELCNARQLKIPREKMKNWRYVLNKVLNKVDIPWENDDPILSDDEIIKVMFEIIMYLYQQKENYPLFINEINRIEEKIGLENLDYEALAKIISQLFTIYHCDSIHGNLKEFGLKDRIGRLCGKNIESGAIISRSITGIREDQYEF

SEQ ID NO: 31 - protein, 1421 aa, synthetic construct
MDKKPPYYIGLDCGTNSVGWAVSDKNYHLLKGTHHIKTEKGTKTKKQTLWGFRLFEEAETAAERRIHRSARRRAERAKNRLKLLRMLFHDEIVQVDPEFYQRLKESFYLLDDKKLQKNSKNTLFNDSNLTDKDFHKKYPTIWHLRQAIINAKDDEAFDIRLYFLAIQHILKHRGHFLMEGEINSDGDVDFESIFENFRCEAERVGYNIADVPAEVKELLMQKMSKTDKKKSLKDILYIEGDELDDDVPKGQLELAGLLVGSKVDLKKIFSINDDEKFPYSFSEGAFEDKLPDIEMTVGSENLDLIFAAKKIYDYVTLDNLLAGNKLISDAMVANYNQHSNDLKKLKQVFRPHREVYDKLFKTKLYNEKFPSYDAYISKAYTEDKSGRKSSKNIGQEDFNKHLHKLLEEIKTKTKPELDSLVDELLDRTDTSEKSVSPLLLPKQRGQAKGTIPQQLHGKELKYILQKLQKDYPSFAEVTPGEDESCNTKAKKIIKIHEFRIPYYCGPIVKRKFDDDGKQVANGKSQFSWADEEIAELVYPWNFDKLIKKEQRANNFIRRMTNECTHLVGEDVLPKCSLIYQKYMILNELNNLKINGYRIDNQLKQQIFERGYKNNEIKGNITLKKLEKWCKDNALISINDEMSGTSEVKTLPKYQTYQDFSRILGTDFAHKYSANKLEKVVESITVLGDEKSMLKQSIQEILNCDAKTANSLSKLSYKDWGRMSAKFLNGITVNDRTILDYLWEDNKNLMELLGQEVGFGKIVEEYNKSKRPVTNRITYHDVESLYCSPAVKRSVWQTIRIVDELVKNLQYAPEKIFLEVTRGEDKNAKGKYTLARRKDLETKLKAVKTDDARAILKELDGYEDRDLQSKKLFLYFSQMGKCAYSGEPISLEELNNSQLYDIDHIYPRSKTKDDSITRNLVLVKANLNREKTNNYPISDTIRNKMHGIWSVWYHQGLITKEKYERLTRATPLTNDELGSFIARQLVETSQSVKAIRDLLKQAYPKTKIVMVKAGQVSNFRHLMSRDKKDRDGNIYEPGKPEFIKVREINDLHHAKDAYLNIVVGNVMNETFTDNPNEWIKRRAGKEYSINPERIFRASKTYRKANGEETSYPEVNGWNFAESIQAVSNTMRRNDVIWTRMNYIESGEISDLQLVGKSNKADGLLRIKQQERLDPKKYGGYNSLKGAHFALIECKDKKGNLQRCIVQIPIIAKNNIENYIAENYTDAQVILPIIKYKSLLKADGLLLTISNKDSDLKNGYQHAVQAKFQQSISPYLKTICSICAKDKLARNNYQISTEDNVNVEHNLQLFDEFCDKMKIYSGYPELAGGIEKIMLSRTTFSELDLKQQCLTLGQMMFIFACKAQNAKLNTIGCGDSVGRIRISNNKLFSYNNLHLINQSPTGLYEEVIDLKTVRPKVNKQDRE

SEQ ID NO: 32 - protein, 1379 aa, synthetic construct
MVLRQLHNTMYRRYCQLNSSEKVKKYNIGLDIGTTTVGWAVVEENTQKVIKKGEARKALWGVSLFEEAKTAEKTRSFRGTRRRYDRRRERINLLQSEFLEEINKVDQNFFQKLKESKYQEDDTVNKSIILSAAEKKKAKEYNNKYKTIFHLRSRLIHDSSKEDIRLVYLAIHHMIKYRGNFLYNVENLNTNKLDLTDRLKSAFDSLMDLASNLNIMENYEKVVSIEEITKAIMNPSKNDIKVKVKELLVNLSDNKNFGSEFGKLVVGNKFSLKKLFMLEELEKDISISFDGTDFEDKYDELENTLGDAIEVISVLKELYDTIFLKKLFKGKATSSLSDLMVERYNVHKEDLQFLKQLFDKDRKLYNQLFRTKEKACIYEQYIHNQLTYEDFIKGLKRLLENISDISINDDLRDKYTREIQPRMDNGEFLPRITDLENGKYPYQLNKDELEKIIENQGKYYPFLKDKINDEYKIVKLLKFRIPYYVGPLVSSDKSRFAWMERKIDKVKITPYNFDEVIDKETTAEKFIKRMVSHCTYLLNEFALPNHSILYSKYKVMNELKQIRINGTKLSDLNTKLPNKIMEELFMKTNGSITDKKFKEYLYYSNELTMYENDLIITGYSADGKFANNMQSYVDFFGKKGIFENTSYNENDADEIIEWITIFEDRDILEKKVRKNYSLLSDTQVKKILSRKYSGWGSLSKKLLTELTIKDKKSNISKNIMTLMEETDENFMQIINNDEYDFQKLIKENNVLKDTNKINYDLVKDLATSPATKKGIYQALKVIEEIIDYIGYEPENIMIEMARGEDKKKARKDDKKKYLQKLYQTMKEENRIDDFDNYDAMSKKLNKVDNIDSEKLFLYFIQEGKCLYSGEPLNIEDLNSAEYEVDHILPRTLIKDDSIDNKALVYRKYNQKKAASFVLPSEYRTGYMKKWWSHLKKNGLISAKKFDRLIRDSYKDEDIQGFINRQLVETRQITKHVANIISNFYKKTNVIYLKANLSHNYRERYELFKFREINDYHHAHDAYLAAVLGEYKEKFMKKDINFVMVKEMNDRLRSLGNYKQLRYGFVINSLDEQVSDIVTEISKSMINKDTGEVLFDAKRFNKQVEKTLYRNDILVSRKTEIRTGKLYKETIYPKGIGTIPVKENMPTNLYGGYSNVETSYLVLVRYGKKKKLIGIPLEIALKSKKDINKKYSFIKEQLNDIDDIEVIKDFIPYETLINYKGQKVHIKGYSISHKNCEVSNALQLKLPSNKAKEWKYVLNKVLNKKNIPIVNDIPIVSDELLNETMKKIILYLYEQKKNYPLFESEITKIEEKINFNEMNIDELEKIIVQLFTIYHCNSVNGNLKDFGLGDRIGRLFSKTIDSGIIISTSITGIKESKYEF

SEQ ID NO: 33 - protein, 1373 aa, synthetic construct
MMYYGGIDLGTSSVGWALTDEHYRLIHKKGKDLWGVRLFDEAESAKERRSSRVSRRRRARETARIGMLREYFSAEIEQTDPGFYQRLEESKYHREDKRTKEKYAIFADGDFTDREYYKTYPTIFHLRKELLESTEWHDVRLVYLAVLNLFKRRGHFLNEYLGETDKEGGMDELYRTFCDSLPEELELKFPELCAAAADFEQILGNRDLSRSGRAEELLAFLGMTKKENKKEFELVKMFCGLSGKLAVIFGKESLGSEFEKKELSFRSSAYEETMTEIGDILPQEYLDVIEAAKNIHDKGLLGDILKGETYLSIARVASYKKHKADLTLLKKTLKKYCKREEYDAYFRVMADDNYSGYVGSVNSEKERSGKDGLQRGKFRRNRNAKKENYKNFWKKTKELLNQMPEEDEDVRYLKQELEKETFLPKQLTSENGVIPNQVHLSELKKILSNAEGYLPFLLEKDESGLTVSERIVRLFQFQIPYYIGPLYIREGEEGRKWVKRKEGGKVLPWNMEEKVDLAKTREAFITGMVRRCTYMEGKYVLPKNALLYEAFMALNELNNVRIHGEKLPVALKQQIYRELFMTGKRITHKRFWEYLVADGQLSKEDTDAISGIDGDFKQSLVSYGRFYSVFGEELKNRDIWDMAEQIIFWGTVYSNDKKLMKELITETFGEKAQKTLLSEAQMKRISGYKWKDWGRLSAAFLTLRGCSKDPNEGGVIYSLIEALWETDCNLMELLSDRFTFMDNLEERTKKNEKLLGEFSYQDLEDSYLSAPVKRMTWQTILILKELYGVMGEPPKKLFLEMPREHGEKGKRTVSRKKKLEALYKGCKEDGRNWEQEIKGLTEDQLRSRKLYLYYTQMGKCMYTGRPIDLETLLRENSRYDIDHIYPRHFIKDDSIENNLVLVEKESNGHKKDHYPIEASIRQERMGHWKFLKEKGLITEEKYKRLTRSWEFTEEELAAFINRQIVETGQAAKYTAQLLKRLLPETEIVYVKAGNVSDFRNKRDLLKSRVVNDFHHAHDAYLNIVVGNTYDTKFTKSPIHFIWNYKRDPEKYRYHMDRMFDFDVIRDGVTAWKAGKDGTIVTVEKMMKKNTPLLTKRAYEAHGGIAEQTIYSAKEAKAESYIPVKSGDERLGDVTKYGGFSSVAGAYYFLAEHGKEGKRKRTLEQMPIYLKERLEQDEEALKEYCIKKLGLVNPDIRIKKIPFRSFVKRNGYYMYLGGKTNTQIWIENGVSLCLSRQWVNYIKRMENFNSNEKEEDNRADKKKEITKQRNEELYQELLTKHRDTIYAKKPNPVYSKLSAKQNDFKELTLREQVRVLLELLKATQCVNLGVKAAEIGLKVSPLNIGKGIGNEEEFLLIYQSVTGIYTRTIDLKTV

SEQ ID NO: 34 - protein, 1368 aa, synthetic construct
MDKFYLGLDIGTNSVGIACTDENYNLLRAKGKDLWAVRLFDEAQTAATRRTFRVARRRLQRRAWRIDILQEIFEPQVDDKLFFKRLNNSGFVFEDKDAQLQSPYSLFADKAFTDKDFYKKYKTIYHLRRALAHGDGKFDIRLYYLAIHHIVKYRGHFLFDGLSVGEVRDVKRLFDRLNEASSQVFGDDAPVWNSEVADKFREIALCRDKALNDKKKACFDLFECADSVRKKAAVTLMLGGKEKPNNVYASGEYKEEKSFSFGELTDEEYDAKREIFGDDFEYLDALHGIYNYLMFERVLSGHDSVSDSMIALYDKHKSDLRKLKNLIRDGLSHDEYVAMFKSIDEKHNYVNYIGYTNRGKKKVNVKKCKPDEFFAYVKKFLIERREVIAGKGEYCVNVCKEILVEIDNKTFMPKILNADNGLFPYQINKEELSRILNNLCRDYPQFGIADSDGKSAADKIISLFEFKIPYFVGPLNTYHSQFGGNSWAVRKQDGKILPWNIEEKIDYEASAEKFMRRMTGKCSYLHGEEVLPRCSIYYQAFDVLNQLNKLKFNNQPISVQQKQNIFNDLFLRVRRVTDKTIINYLVKCGQIPASEAEQTILSGKDGDFKASMSSYITLCQILGENFVKNHLDICEDIILLHSLHTDKKTVGRIIEERYGNYNEIKIALSRLKGITSFKDFGRLSRKFLCELSGGTLPTGAPRTILDELYETNNNLNELLYGEQYCFSESIAQENGEIDGNITYETLEDMYISPQVRRGVWQALKMTDECVRTVGRLPDKIFIEVTRGGGNKGERTVSRQKKLAALYNSARQAEYDIAELTKELNRQSDMELRKERLYLYFLQLGRCAYSDEPISLDQLNSDMYDVDHIVPRALTKDDSIDNKVLVKSELNRKKKDIYPVCAALPSEFERAKRLWKTLNSVSYQNEKLMSDKKYAALTRVAPLTDDDLRDFINRQIVVAGQSVKAVADLLKRKYGTEVKIVYSKASNVDDFKQRFGIIKCRETNDLHHARDAYLNIVVGNVYDTKFSSVATMRYEKDGRSLEYNFDRLYNKPISGAWNGDGSISHVKSVAAKHSMCVTRYSYTGKGELYNATVYGKDKGLIARKQSGPYSDTEKYGGYNSLTTGYFAVIQSKDKKGNQIKTIEAIPVLVAETEKTQKGAFMRYLTDVRGLKEPKIILDKLKIKSLLKYNGSYLWIAGKSNNRIIYNNAMQWYADDKIDAYVKALTKLCSYKAKNMLSEDELKRAEYYINTNRKGDKKSVVNADENLQLYDAVTEQLAKPFYGGASGFTCVRKKMIAKRAEFQKLSVLEQAQTLLGCIHVLQCNGSDADLSKIGESSHAGKLVINNDITDAEVFVINLSECGFTEKRQKL

SEQ ID NO: 35 - protein, 1338 aa, synthetic construct
MEKFYLGMDIGTNSVGIACTDEKYRLLRAKGKDCWAVRLFDESKTAETRRMFRGARRRLERRKQRLGFLQALFAPFIDDETFFIRLNNSQYYPEDKSELLGKNKNNLFADKNYTDKDYHKDFPTVYHLRHKLQTERMSDLRLYYIALHHILKYRGHFLFEGGMNDVRDVGRLFTELNEVCADLYSDAENIPYFDPSYTQEAKECLMRSDMGIRDKQPHLESLFGKDAIIREIIKGICGASISPKTLLGDSYKEEKAFSFKKITDETFDAMQSTYGDDFALLEKMRAIYSYIVFEKLLEGHPNVSSAMIKLYEDHKRDLCQLKEFLRKNAPDEVYKSFFKSDKEIANYVNYVGYTKRGGKKVKVKLCDDESFFTALKKMLLQLDGVKDTSILDGIIQKIDNGTFLPKILHSDNGLFPHQVNEDELVKIISNMVDAHPQTKEMADKILPLFLFKIPYYVGPLTGKNSWAVRSSEKITPWNFDEVVDKAQSNERFMRRMTNKCTYLHCEDVLPQASILYQKYNVLNQINKLKIDDVPIPAFLKQQLFEELFLRKKSVTDKAIINFLVRNGQLDDCRKNIAKITGKDGDIKASMSSYIRLKEILGDFVDEDLAKGGEICENIILWHTLNTDKNIVCDLILKNYGDISVIKDHIKQLKGLVFQKFGRFSKKFLTGIDAAQSNSGARISILDILYETNQNLNEILFNEKYNFEEAIAKENGTTSSDITYEDVENLYVSPAARRGIWQSLQMSEEYVRAIGKIPDKIFIECTREDGQKGDKGRKSSRKTRLLDCYKSIKKYKEYEDIFNELDNSGITDMRLRQERLYLYFRQLGRCMYTGERIDLEDLATNRYDVDHILPRCYIKDDSLDNKVLVLRSKNAEKRDRYPLPHGFSNQQVFWKLLLDKDLIKDVTYKRLTRVEPLSEDDYNDFINRQKVITDQTVKAVAELLKRKYPESKIVYSKAKNVSDFRQKFDIYKCRNTNDLHHARDAYLNVVVGNVFDTCFSTPMSLFYNKNDEWRTYNLKTMFTRNVAGAWDDNSISTVKTICAKNSMAVTRYAYREKGEFYNQTVYARDDKGITLPRKGKGVLADARRYGGYKGQSTAYFAIIQSKDKRGKVIRTIEAVPVLLHEQSKNDFKILKQYFENSGLREVEILVPEVKNKQLISYNGMPLYMTGVSGSNILCWNGVQFFSDSKIDEYVKALAEFYERYGRELDSKTDEFYIIKTNRMGEVKLKIDRRQNESLYNMLSSKLEGKIYSGMNYCATFRKILTDGAEKFNKLTVANQVKVLLQILNFFECNALRSDLSLIGGGAIVGTLKFNKNITDVDFRLIYQSPCGLTKRERKI

SEQ ID NO: 36 - protein, 1350 aa, synthetic construct
MIKYYVGIDIGTDSVGIVCTDEEYRLLRAKGKVLWAVRLFDEAKTAKERRNQRTARRRLQRRAQRIDLLQELFYPHISDKLFFARLNNSGFLYEDKDEKLQSPYSLFADENYTDKEFYKEFPTVFHLRRALIAGEKKYDLRLYYLAIHHIIKYRGHFLFEGQEMSEIRDIKRLFDNLNETADNTFDEGAPIFLAEKAEEFKKTAMSRMGVNDKVKECCALFGVGKDERKKEIIKLLSGGTGKTCVIFDNEEYRDEKICFKGLDSETFEAKQTVFGDDFDYLSKIKSIYDYIVFEHILQGNAYISDSMTKLYDKHKSDLRKLKDFIVKNCSHGDYIKIFKSTEEKSNYVNYIGYTKKGKSKVNVKKCKYDAFKKYLQNFLDKTPLSEEQESVKKDIIEELKNDTFLPKILNADNGLFPYQINLSELDKISENLCRDYPEFGIKTDGNSIADKIRSIHTFRIPYYVGPLNTSAGINAWAVRKKDGRITPWNFKDMIDEAESNEKFMRRMTNKCTYLYGEDILPKCSILYQKFCVLNELNNLRINEQKLSVQLKQDIFNDLFLKDKRITYKKIREYLVNKGYFAKNEETGINLSGTDGGFKSSMSSYIALKSILGNFVDSHSDVCEQIILWHTLNTNKDIVAELISKNFGSYKEVASNIKALKGLSFKDFGKLSKRFLCDIKGGVDEETGAVYNMIETLYNTDKNLNQILYYDKYTFLQRIEEENGDADDEVTSKTLTDMGLPPQVKRGVWQALQMVDEYVKALGCPPAKIFVEVTRGDESRGKKKGVRSVPRKAQLQNLYKEVKDIDELKKELNREEVTDSKLREERLYLYFRQLGKCAYSGERIRLEDLGSNQYDVDHILPQSLTKDDSLDNKVLVLRACNARKSDTFPVPAEYQAKMRKDWKLWKEKGLISDKKYSLLTRTEPLNDNDYRDFINRQIVTTGQMSKAVAELLKRKYGEETKIVYSKGINVADFKNKYGIVKCRETNDLHHARDAYLNVVVGNVYDTRFSGVHRMFAKREDDSWRQYNLKKLFDRPVGGAWNPDSSIETVKNTIRQSGISVTRYAFTENGAFYDATVYECGDTGIDAPRKENLPTEKYGGFKSLSTAYFAIVRSVDKKGKSIKTIERVPVLTVYKQKTDKDAFINYLTNRVGLKEPQILVEKVKIKSLMEVNGTPVWIAGVSKKDILIHNAVQWYTDAETDKYVKGLVKLEDMKKSGKLSDKELEEKEFVLHTNRFNENKLVVEPKLNIDLYNRIISQLEKPIYGGISAFATFRENLRKGSEKFKELRCFDQAYVLLQCIKFLKCNAEIADLSLIGAGEKSGKLTINKNITGKDIVIVHTSPCGLIERRKKV

SEQ ID NO: 37 - protein, 1355 aa, synthetic construct
MGNTRGKDKYYLGLDIGTTSVGWAVTDDRYEIIKRHGKALWGIRLFEQANTAEERRAFRTARRRTERRKNRISLLQQLFSEEIAAKDPGFFVRMKESKYIPEDKRDLEGKRPELPYTLFADQEFTDVEFHKQFPTIYHLRYTLITQMDEKPDIRLLYLALHHILKHRGHFLFEGKEISEGMNFLAAVEVFLDCLEENGIELSEFQQEDKIRKLEEILTSSDSSRTEKKKQLCGLFAGEDKQKMALVGLIAGCKVKLSVLFDDRALDEEERSEISFSDDNYEEYISQVEEVLGDRFLLILSAKAIFDWSILSDILGTCSYLSEAKIQSFEKHKQDLIKLKNLLRKDRACYRKVFGEPGKTANYSAYVGMVKKNGKKQPINKNCSREDFYNFLKKTLQDIPCAETDRKVRDEMLEEIEKGTLFPKQILRDNAVIPYQLHEKELNKILENAVRFYPFLEKIDEDGYSVSQKIKEIFRFRIPYFVGPINTYHKEKGGNSWAVRIGNNTDKIYPWNFSKKIDEEQSAERFIKRMTNKCTYLLGEDVLPKESLLYAKFNVLNELNNLRIDGELVSVEMKKKIYHDVFKRHKRVTGKRVKDYLIREGLITKEQELSGFDQNFKSSLKAYMDMKQITTGISLTEQQQEDIILDITLFADSPKMLKRRIKQKYPQLSDKQVTQLSEKKYSGWGRLSRAFLEEVEAVNPETGVAMNLITALWETNDNLMRLLSKKYSYAEEIEKRNAWGDSESEISYQTVQDLYVSPAVRRPIWQALKIVKEIEHIMGAAPERIFVEMAREPGKKGERKISRKSRLQELYRFCKKEASELYDSLSQKDENELRSNKLYLYYTQMGRCMYSNEVIDLEELFTNRYDIDHIYPASKVMDDSLDNRVLVKSERNRSKSDTFPVPESYVKQAGDLWRTLSEKGLISKEKYHRLTRRDSFSTDELAGFIARQLVETRQSTKAVTQILNKAYPKTEIVYAKAKAVSDFRQQFDLIKVRDLNDHHHAKDAYLNIVVGNTYYVKFTKDASWFVKNNPGRTYNLKKMFENDVKRGDEIAWTSGGKGTIHTVKKWMRKNNILFTRKAYEVKGGLFDQQLVKKGKGQVPVKGKAEDTRLASIEKYGGYNKASGAYFILVQSDDKKGNPMISFKFVPVYLAQKLEESQENMLQYCREELGLINPRVLLPKIKMGALIEVDGFRMHLSGRTNNRLLFKGANQFVVSERIQKTIKKVGKVCADHAINKNVAVSDRMGLNEEDLKRVYDTFHDKLKNSIYGNQLSAQIDTLENGEDKFVRLSKVEQCLVLNELLHLFQCRSVLSDLTLIGGPKRAGTILLNSNISKLEHIFLINQSITGFYEQVIDLKAL

SEQ ID NO: 38 - protein, 1357 aa, synthetic construct
MEKFYLGLDVGTDSVGIACTNEDYELLRAKGKDLWAVRLFEEAKTAAERRSKRTARRRLQRRAWRVDLLQELFEPYMSDSLFFPRLNNSGFVYEDKDARLGSPYSLFADKNYTDKTFYKEFPTIYHLRKALVYGDKKYDLRLYYLAVHHIVKYRGHFLFEGQSMSDIHDFRVLLDKLNQAAEESFFENTPIISAEKSDELKEIALNKSLRLNDKKKKCRSLLNAMKSPLKDIVTLMLGGSAKPCDIFDNDEYKQLKSISFKGMTEDEFSAYEDTFGDDFAYLQALKKIYDYIVFEQTLDGNDYISEAMIKIYDKHASDLRRLKKFLAENCPHETYLKVFKSVSEKNNYAAYIGYTKVGKKKVKLKKCTDKAEFDKFLKKIVSEVKVSDGDTEKEKLLSEIENGDFLPKILNADNGTVPYQINGVELNRILENLCRDYPDFASAVDGGLSIANKIKSIFEFRIPYYVGPLNTYHSKDGDKGNSWAIRRSEGRILPWNFDEKIDRAKSNESFMRRMTNKCTYLYCENTLPKCSILYQKFNTLNQLNNLKIDEQPISVELKQAIYNDLFLKDKRVTKNRIRKYIVDRGWAPSSRESEISLSGFDGEINVSMSSYIMLKNILGDFVDENTDICEDIILWHTLNTDKGIVENLIKSEYGHIGKIAENLKRLKGITSFKDFGKLSKKFLSEIKGAYRETGEVATVISMLYETNLNLNRILWDKRFTFMEAIDAENNVSSEDIAYGALEDMGLNPQVRRGVWQALKMTDECISAVDRAPDKIFVEVTRGCGEKGKRTESRKMKIEKLYETAHDVDELLSELKTRSESDLRQERLYLYFLQLGKCAYSGRQISLDDLNGNTYDVDHIVPQSLAKDDSIDNKVLVYRECNAKKTNIYPVPEQFRSMRKMWDRLKAQGLMSAKKYSLLTRTEPLAESDYNDFISRQLVVTGQTAKAVAELLKRKYENSGTKIVYSKGSNVSDFKSKYDIVKCRETNDLHHARDAYLNIVVGNVFDTRYSEAWFKSRDTYDKWRNYDRTKIFDREIDGAWHGQDTLVKVKATVGKCSIGVTRYAFTGKGKFYDETVYGKDGGAQLPRKEGKAGSPSPYADVEKYGGFKSPFTAYFVVVKSVDKKGNPIKTLEAIPVIVDYKSKNDSHAVMNYLCNVRRLKDPTVLVEKIKTHTLLEINGTPAWIAGITGSQILLHNAVQWYTSSETDRYVKALAKLDEADKSKRISDEERNRAEFEMSTNRFKEVKCAVNAINNLKLYDEIIERLGRKIYGGLSSVRTFRGNLSKSREKFVALSVIDQAKVLLQCVKFMKCNAEAADLSLVGCGKRCGILLINQNITDMNITVVHTSECGLTERRIKI

SEQ ID NO: 39 - protein, 1371 aa, synthetic construct
MIDNLCIMVEIAQIKWYNMVKCNVIQWGKVIQMKKDYYLGLDLGTGSLGWAVTDAQYEILRKHGNALWGVRLFDNANTAEERRLFRTARRRLDRRNQRIKLLQEIFAEEINKVDEGFYLRMKESRYVPADKLDVKKKCPELPYALFVDIDYTDIDYHKQFPTIYHLRRWLMTTEETPDVRLVYLALHHLMKHRGHFLFTGNIENIKEFNGTFRQFIKGLQDEELDFALDITDDKTVDVESILKDSRLTKTTKKAKLIKLLGAQTACEKAALGLICGGKVSLRDIFGNKELDNCERPKISFSEAGYEEYANVVEADLGEQFVIIERAKAVYDWTILADTLKSYTSISEAKAASYEKHKNDLIYLKKLVKENLGKDSYRTIFVKTNEKLTNYSAYIGMTKVNGKKCEMVGKQCSREDFYAFLRKEVMNKIADEKKTEYLRSEMEKGTFLPKQVTKDNGVIPYQVHLYELREIINNLKERVPVLKENEEKIELLFTFRVPYYVGPLNGIKKGEDTTNWVIKRKQERIFPWNFEEVVDEEASAERFIRRMTNKCTYLMHEDVLPKNSMLYCKFMVLNELNNLRIDAEPISVALKQQIYERLFQRYRKVTQKKLKAYLLQEGLIDRNAVITGIDGDFKSSLRAYHDFKEKLTGCALSQDEKENIILNITLFGEDKKLLSKRLAKMYPNLSMAQRKGLCTLSYTGWGRLSKEFLESITAVSPETGENMSIIQFLWETNENLMQLLSEKYDFAKKIEAENVNEEIRNFSYNLLEQLRVSPAVKRQIWQTLQIIKELNKVMEQPPKKIFVEMAREKAESKRMESRKSKLLDLYKACKNEERNWIDALGNTEEHQLRSDKLYLYYSQKGRCMYSGEIIRLEDLWDNNQYDIDHIYPQSKVMDDSLDNRVLVKKTYNAEKTDVYPIAADVRKKMQSFWKALWEGGFISKEKYERLSRCTEFEASELAGFIARQLVETRQSTKAVASILKQVFPETEVVYVKAKIVSQFRQDFGMIKVREMNDFHHAKDAYLNIVAGNVYHTKFNGNATWYIKEHPGRSYNLKKMFTSDKDIGRGGEIAWKAGENGTIRTIRKYVDKNNILVTRRSYEMGGGFFDQQLMKKGLGQIPIKSSNERLCNIKKYGGYNKAAGTYFMLIESEDKKGNKIRTLEYVPLYCKKQIEQSERDALCYFAEDRGLKNPRMILNKIKIDTLFKVDGFYMWLSGRTGNQLLFKGAVQLLLTSCDERTLKKVIKFVQRKKENKNTVIVEQDMIFEEDVLHLYDTFLSKLGGTVYHSRLSAQEKTLREKRDAFNELCKEDQCIVLYEILHMFQCQSGAADLSMIGGPKKAGILVLNSNITGCKQISIVNQSPTGIYQQEIDLKTV

SEQ ID NO: 40 - protein, 1115 aa, synthetic construct
MEKTFQNKERQVKMGVRFGLDIGVASVGWAVVNDNYEVEEAGANLFTSADANQNVERRSFRQIKRLHRRRRNRISDFKKLWHSMGLEIPATNINNVLGLRVKGLNNRLSEEEIFYVLRNELLHRGISYLDDAIDSSTSLQSDYAKGISENQKELDSGSFPCEIQVKRLEKHGRYHGNISIGQDDEKVILSNVFTTSAYKKEILAILEQQKKFHKFLTDSFCEKYIEIFLRKRKYYTGPGNAKSRTDYGKYTTKINKETGEYITEKNIFEKLIGKCSVYKNLERAAGATYTAQEFNLLNDLNNISVNGRKLSKEEKEAVINETKTSNSFNIRKILKKATGEDIETLTGARLDKNEKEDFHKFAQYNLMRKEFEKNGFDITALSRENLDKIGRVLTLNTEKEAILNGFKLEGLSLPEEMADCLVCLRKQKGSFFSKWQSFSLEIMLKLIPGLYEQPKNQMELLSDMGVFKTSKDIFKNCNNIPASAILENIYNPVVSRSIRVTVQVVNALLKKYGYPEQIIVEMPRDKNEEDMKKRIADGQKKNQKELDSIIKKIDSEYGIKITEQDFFQHKKLVLKLKLWNEQGGKCLYSGKKIDIHDLLYNPSIFEVDHIIPKSISFDDSRSNKVLVYSTENQKKGNTTPYIYLKDLNGNWGYKEYFSYVCQLRKNNLITKRKMENLLFTEDITKIEVLKGFINRNINDTRYASRVVLNTLQGYFKAKEAPTKIKVVRGSFTHQFRNKLYLEKDRKETYAHHAVDAMIMCYSQMGFDKYHKLQSEIIDFETGEILDIKRWKEEFNEKTYNELIYQNKMIQIRANIKKAEKQVKFWHKRDSKPNRGLCNQTIRGTRNDNGTIKKVNKLDIYDPSGVVTLKKMISQGKENCFLMYQHDKKTWEDMLQIMEEYKEAKNPFTEYENETGDYLRKYSKKHNGPRITKLKYLDGEVRSCIDISHKYGFEKGSKKVILENSNPYRMDVYYNTKDQKYYLIGIKYCDLKFCKDGYIIDEETYNRILVSEKMLKPGQTRNNLEALGYKFMLSFYKNEIIQYEKNGEHYTERFLSRTMPKARNYIETKPVDAPNFEKRNVIGLAKTTSIKKVRLDILGNQYYSTSEKFKKIVDTI

SEQ ID NO: 41 - protein, 1155 aa, synthetic construct
MDKNDFKKTKYHLGLDLGVASLGWAVIGFDKEKDSKYLHDFGVRIWKQPVNRNGKSLTLIRRHQRSVRRLVRRRQHRISRLLNFLVSIKILEKKEDYYSWIIYKSEKEKEEKKPLNLKLKGLAGKKLQALELVTCLVNYAKQRGYSELFTTLQENKNLEDEFIYDETKIDKKLQEIKNWFQKHENISEKKDKDNATKKLNTQKYLLGMKNAMSCENKEKFPSEVIKDWKDNKTNKLFFRKSWQKEITELLSKQFSFHSQLNEKNRDRVLLIIFSQRYSEDGPEKNSPYIHKMFHNKMALSPFSSEEKKTTQHYTFWVLYKFIKIISLALFERVTSDNDEDKTVDKFNLQKLLPNWTEFAESLIYEFLKLNKLSLSKSREILENFIEKKLQKHISDDVIQEIKNKLKNFWTERKNDFTQFKLFEAFKKIIFGTKITKKALLKEKNLMNSIAYKMWLNFTLKKRQEEFEKMKKDNSRTTEEIDKLNKMGKSLIESQYSVPKAPFKQHMVAVINNFVNNDRFCDVNPYIYEEKESRKLISVSAEKLRKHKIFSKFLSEHIEYRVDNPVAFRSINQVRIVLKKLFAKYKNFDNITLEIGRDLNTKKEQETIRKRQAENNKQNKKIEKEIKRELGYDSVNSTKRLRYKLWKEQNFDCLYCNQKIEKEKIFSIYTHIDHIIPRTTTVNNSHDNLVLCCTDCNLAKGTKLIRIWKDNKFQNWIQSIEKKLKLNKKKIYHLKLQKEDLNNFLNRDAVNNSIIGKFFKNYIEVNLASKNMNTPVKVMSGRITRKIRDKLFRWTSWGIEKDELRKITRFHHAIDAICIALMDKQKIISFITDWININRYTKFNFEKNEKNNDIDILKPKWKHSINNFQYFTAKEKNVINKIFQSGTKVDNRLLFELFKINSNFDTEVENRMPVLLNKTLVEKNGKKKMEIEVSDVLDENKYLEKIKEYGYQGDIHYPFISKQIIKKIPKTLSGEQPIKLKGKEDKDEYLSNESQTNYWDARKYYGFNLEGQWLLNKNFWKKKRQTRYCEKCNKVKIGKATFWIDENKNEQFICKKCFKKENFSSVWNKTKFITQNETLEWKINEHYYYYSFLGKHGNAIDLESLGLKNFRFDPKSKNFKKNSPEKGFSAFLKKFKNNEIKVLNISLLGKKQTRSR

SEQ ID NO: 42 - protein, 1355 aa, synthetic construct
MYYGGIDLGTSSVGWALTDTNYRLIRKKGKDLWGVRLFDEVKSAQERRSNRTARRRRARETARIGLLKSYFADEIDKVDTGFYQRLEESKYHKEDKKTGNRFAVFADREFTDREYYETFPTVFHLRKELLESDAPFDVRLVYLAVLNLFKHRGHFLNEYLEWEEHDKNMADLFREFYETLPEESELHFPQTADWTLTEEILGSRLFSRSEKAEKLAACLGIVRNQNKAEYEMIKLFCGMSGKLALIFGQEIAADAYGKKQLSFRSSSCEEEMEALGDCLPEGYMDMIEAAKRIHDKGLLAHILKGHTYLSQARVETYEKHKEDLKKLRHVMKKYCKDEYDAYFRTMTDHNYSGYVGSVNSGKEKIRRNRGAKKEAYKAFWKETKRLLNLMPQEDQEVFYLKQELEKETLLPKQRTFENGVIPNQVHLAELKKILSNAEKYLPFLREKDENGLTVTERICKLFAFRIPYYVGPLSVKGGEGRNWIQRKETGRVLPWNMEEKIDMAKTREAFILKMVRQCTYMKGKNVLPKNSLRYEAFMVLNELNNVKIRGEKLDVGLKQKIYRELFLTGKKVTGKKLFQYLCVNGILSPDEQEAVTGIDETFHQSLTSYGRFRSILGDEIENREMQKMAEQIIFWGTVYSNDKKMAGELMRETYGELSEKPYLTESQIRRISGFKWKDWGRLSKDFLELQGCSRKDGVKRSLIRALWETDCNLMELLGAEFTFRDTLTGQIQEQEKLLGEFCYHDLEDSYLSAPVRRMVWQTILIWKELCQLMGEAPARLFVEMPRGEGEKGKRTVSRKKRLEELYQACKADSRNWLKEIQDLSEDDLRSRKLYLYYTQRGRCMYTGHPISLEDLLLGNRYDIDHIYPRHFLKDDSLENNLVLVEKESNGHKSDTFPIEASVRRDRQGLWKSLKDGGFISQEKYKCLTRSWDFTDEELAGFISRQIVETGQATKYITGLLDRLLPETEIVFVKAGNVSAFRHQTELLKSRLVNDFHHAHDAYLNIVVGNVYYTKFTQNPANFIRAYRRDQKGNAYHMDKLFWYDVVRNGAVAWKAGQAGTIGTVRAMMARNTPLLTKRVYEAHGGIAEQTIYSAGEAKERGYIPVKSGDERLRDVTKYGGFSSVSGAYYFLVEHEKKGKRVRTLEQMPIYLKTSLEKNEEAWKNYCIETLGLVSPEIRWKKIRMRSLVKRNGYLMNLAGRTGRQIYAENAVSLCLSQKWVNYIKGLENFKESGKEEDRRENKEKRITKEKNELLYQELVIKHRDTIYRRKPNPIWTKLIEKQAVFAELSVREQVNVLLELLKVTQCQNLSMDAKEIGVKASPDKIGIEVTAQEEFLLIDQSVTGIYSCTIDLKTI

SEQ ID NO: 43 - protein, 1355 aa, synthetic construct
MGNTRGKDKYYLGLDMGTTSVGWAVTDDRYEIIKRHGKALWGIRLFEQANTAEERRAFRTARRRTERRKNRISLLQQLFSEEIAAKDPGFFVRMKESKYIPEDKRDLEGKRPELPYTLFADQEFTDVEFHKQFPTIYHLRYALITQMNEKPDIRLLYLALHHILKHRGHFLFEGKEISEGMNFSAAVEVFLDCLEENGIELSEFQQEDKIRKLEEILTSSDSSRTEKKKQLCDLFAGKDKQKMALAGLIAGCKVKLSVLFDDRALDEEERSEISFSDDNYEEYISQVEEILGDRFLLILSAKAIFDWSILSDILGTCSYLSEAKIQSFEKHKRDLNKLKNLLRKDRACYRKVFGEPGKTANYSAYVGMVKKNGKKQPINKNCSREDFYKFLKKTLQDIPCAETDRKVRDEMLEEIEKGTLFPKQILRDNAVIPYQLHEKELNKILENAVRFYPFLEKIDEDGYSVSQKIKEIFRFRIPYFVGPINTYHKEKGGNSWAVRIGNNTDKIYPWNFSKKIDEEQSAEKFIKRMTNKCTYLLGEDVLPKESLLYAKFNVLNELNNLRIDGELVSVEMKKKIYHDVFKRHKRVTGKRVKDYLIREGLITKEQELSGFDQNFKSSLKAYMDIKQITTGISLTEQQQEDIILDITLFADSPKMLKRRIKQKYPQLSDKQVTQLSEKKYSGWGRLSRAFLEEVEAVNPETGVAMNLITALWETNDNLMRLLSKKYSYAEEIEKRNAWGDSESEISYQTVQDLYVSPAVRRPIWQALKIVKEIEHIMGSAPERIFVEMAREPGKKGERKISRKSRLQELYRFCKKEASELYDSLSQKDDNELRSDKLYLYYTQMGRCMYSNEVIDMEELFTNRYDIDHIYPASKVMDDSLDNRVLVKSERNRSKSDTFPVPESYVKQAGDLWRTLLEKGLISKEKYHRLTRRDSFSTDELAGFIARQLVETRQSTKAVTQILNKAYPKTEIVYAKAKAVSDFRQQFDLIKVRDLNDHHHAKDAYLDIVVGNTYYVKFTKDASWFVKNNPGRTYNLKKMFENDVKRGDEIAWTSGGKGTIHTVKKWMRKNNILFTRKAYEVKGGLFDQQLVKKGKGQVPVKGNVEDTRLASIEKYGGYNKASGAYFILVQSDDKKGNPMISFKFVPVYLAQKLEESQENMLQYCRGELELINPRILIPKIKMGALLEVNGFRMHLSGRTDNRLLFKGANQLVVSENIQKTIKKVGKVCADYAINKNVEVSDKMGLNEEELMRVYDTFDDKLKNTIYGNQLSAQIDALENGKEKFVHLSKVQQCLVLNEILHLFQCRSVLSDFTLIGGFKRAGTIRLNSNISKLERVFLINQSITGFYEQVIDLKAL

SEQ ID NO: 44 - protein, 1415 aa, synthetic construct
MDKNKPYYIGLDCGTSSVGWAVTDEEYHLLKGTHRIKSEKGTKNKKQTLWGFRLFDEADTAAERRTHRSARRRGARAKTRLKLLRMLFRDEIVQVDPEFYLRLKESFYYEEDKKLQKNSKNTLFNDANFTDKDFHKKYPTIWHLRQAIIKADKIESFDIRLYFLAIQHILKHRGHFLFDGKLKNGRGDFGEIFAEFCDIAKSYGLEIEESMQSEVERIILSDSTITDKKKQLKDLALFLEQDEAEDAKTLLRQQRCLCDLIAGGSVDLAKLFALELDEKCSYTLSQLDEKEDEIAGKITLDNMPLLVSAKKLYDYGILSKLLGEHSMLSDAMVANYEQHKKDLKELKRVFKPHEKIYAQLFKDNKYSKKSNKFDVSKNSSYDAYAGHAYQKEGDRNGHVIVSQEDFNKHLKRLLEEVGYNGELLTRAEKGYLLPKQRGQAKGTIPMQLHANELEVILEKLQRDFPSFAKVVPGEDETCNNKAKKIMKIHEFKIPYYCGPLVKRKFDDDGNSVANGKSQFSWADEEIVKLVYPWNFDKLVNKDKRAKNFIRRMTNECTYLIGEDVLPKCSLIYQKFMVLNELNNLKVNGHRIDNSIKQQIFERGYKEGEIKGNITLKKLEKWCKDNSFIGADDELSGTNEVKILPKYQTYQDFSRVLGIDFEKKYPATKLEKVIELITILSDEKSILKKSIKTELNCDDELTTHLSKLSYKDWGRMSACFLNGININNRTIIEYLWEDNNNLMELLGQEVGFGKVVEEFNSDKRSKATKVNYRDIEKLYCSPAVKRSVWQTIKIVNELTENLGYAPKKIFLEVTRGEDEKAKGKYTLARKKDLEAKLKAVKTEDTRAIIRELDGYEDRDLQSKKLFLYFSQMGKCAYSGESINLEELNSSRLYDIDHIYPRSKTKDDSITRNLVLVKASLNREKTNTYPISDSIRNKMHAMWGAWYHSGLITKEKYERLIRGSELTNDELGGFIARQLVETSQSVKSIRDLLARAYPGTNIVMVKAGQVSEFRHMMSCDKKDCDGNVYRPGKYEFIKVRDINDLHHAKDAYLNIVVGNVINETFTNDPYKWVKDRNGKEYSINQKRIFRESKVYRKANGEETSYPEVQAWQFADSIKLISDVMKRNDVIWTRMNYIESKEISDLQLVGKGKNADGLLSIKQQKRLNPEKYGGYNSLKGAHFALIECKDKKGNVQRRIVQIPIIAKDNIEKYIANNYSEAQVILPVIKYKSLVKINNFPLHIAGKTSSGLVLYSAKQFLVDEDTSRYLKLIQKVIGKIKAAKNHYEASSKDAVSQSENIKVMRKICDRLEILSEMPSFGDKVQEIKKYNELKFQNLDLESQCNILNNMMKVTKCNAETGDISILVPKSSHLGKPTMPEDIMPRYSAVALVNQSPTGLYEEIVDLKTVQPKINKQGEN

SEQ ID NO: 45 - protein, 1458 aa, synthetic construct
MKKLSIAIDMGAKNNGIFMVKTDGDKIIDKKASCIVIDGNKINFSKKSRRKNRHKDRNYKRRKLAKRLLDELVDMSQYDQKQAEFIFGTLNNRGYTLLSSENEFEELSDETMKFNKLYLEAISGQATKEKFELYFTDEFDDDKALLNFLDTNIKNIKKTISNLINFSKKDKILDDLVSLKTNSIKKFNAFSHVKILLSKYGYRDLGKNEKDITEKLKNNNIYLSKFDFDKEKQDIESLNFDKESVKDKSIITKDLKLLKEFLSGIQKEIATGAKPRKQYLKEIKEEIEKQFDFIQNFTKDEFFNIVGNISNLQLRILRKFFNKNSTKNSQLQVLKRYFVAFHYKDEAKSRRKKLFVELNKHNDILSFFKTCDPELTSPPYEDMNNRDTYKCNSMLIKPELITDDIKKAIDILLSKDEFATITQEIDKSTGEFKHIGIRDKRVSKHQKLSQKELSKYNNTDNHAPIIYQSTDWTYSKYLQRIFDMKLFDKITKYKNADKIYEENFNSFYHPRNVFKHTKKFEKGKIDSIELFKKLFGKDTYDSLKPIAEIYYKEEQKIKNGIYSHDTSVFVKCGTNTPYKNNAKHILLKPLYSYSFTSDESDKYLEAIKKTRGLQTQLELISNEAKKHQNGFYNIVKACFDDDKCVADKEIKKIITNLNPNLEAIQTIFKDLNIEAKYFNSIEKVDENNLTTIINILKQTFEILFKELSGFNKTCQNCTKENATRSDQTFPIAQRLLSDVAKPIDGMLDMMIDRLAHEITTNIDKSDIEDIVQLDILLEQNRFEFEENLNVIKRASNKDIKKLKREYKDRLNIDICPYSGKQFDKGDYDHILPQSKGVYNSKANMIYVSSDGNQNIKGATTWTLDMLKKPHLNTMFHTDNIKEIKEFIKTNIARIDQTNFTNFDNLKLNEQIAFRYALFMEHTSSEFKTAFDLLKKDKLKTITNGTQKRLARLVYEKLVQKFPYEFNAKNKNKTLKIDVNSKTIDYKLVSTTRRYLAVDQTTGEINHLFKEDIQDSHSHCIDAMVVFYLANSDAQKIKRSDNLSDKISKRVFNFDFKDIYVEESSINNIAKNKTFINSPKKELGSYKLFDDTIYSENYKHITKENTTKKELEILVKYLLLFVYEKGKKIVIDNIEKVKEKTIYKIDIQKVSNTIYKLFNNKDKPGLVSLKFLDKYQYFTSRKEIQNIFFDDKKTKLLEYEKIKNIPYFSNKLYKAVYKKLLEEKKLFDISDDKKTILNSKILEELLQDMFDSKQKAENKKQRKRGKKRHKYSLPILGSPKFRIKRGKTWQVLGNKDIATKNYIIDGDIKPVPYFSKNTIPLKIKDLIDCLLVNKDDKNIYSVTIDTTKICDYVSNLTYLITEAKRCTVISTFVKASFVDVDISSVGVFDGAKDKVFESFIANYIDNKDLELSKYIGSIRDGINAKATIVDNNNQTITLKYKASINKDKKQIILDNLKDK

SEQ ID NO: 46 - protein, 1624 aa, synthetic construct
MNNNQVLSPIAIDLGAKNTGVYFAHYPDLDNLNKEDLKKFSSIRTFIMDKKTFSLLMKDRTARRHQKRANIRSKLAKRFFILIARQEYPELFEDDNKINENIKIAISYFLNRRGFSFASALEKLDDEDNKLLGKLPSHFVEKMLSALEKNEYSNGKEIARLIRAIVSDLNEKDLNLLEFVKYRTNSPNEYSELQKLLRVPIDEFKKELRKEIAGLDKINEDKKRKKLIADKKKKITEEFTTRFGILRFNDSEPKLPNDENGDPDYSISEESIPDDINNTNERLNHYYKWVLYYLFEIINETGNYHRKDYFENCRKDYESANNDTSIGKCIRQLREKIGDNRKIEFQNLLFNISNFQLRLFRKFFNNKEHQTGDKWEPERLDKIFIRYIRSWHVDAQKDGADKLKIRKDILSNFHSLILTHGSRTITFLKNTTPTDTIPPYEDQNNRNIPNCQSLLINLDYFSNKKQFKYFNEWYEILTTKKFAANLDSKMDLSLSVEINNTLSSYDNYLKRTQSKTHSINTYLNKIIKDTKSRKLAFVLDSIRTLHKGKKKDAVEYLLSHIEQNSNNNEIKIGFSDFIYQYYWAIDNSKNTKVNQLKYTVNKNENPDPNIQKNFPKYIKNYFKQNSILLECEGKTPSKNNTFIESICNILLILKSDIKEDLINDKNKINELQNKLIDGLKSKKISRSSVYSHLEKCAKAQKDYKNILNEKLKEIKNKEDTIDKEDKPLKNISDNIEIATDEIINVANTTFQINKHLIDRTKINNIYTHAQLFSFLDDRKGYSTICRYCVEDNLIRLTKINNTEKRITHRLSASSVRIIDGVVEKYLGHLARIIANSKWQQIKSYNLEKGATVNIPVFIEENKFDFEVNLSIYKGKNSKKVKKSKIYSLEDRIKDTNIDICPYTGKKINNMGELDHILPRSYTTKYFKQVFNSDANLIYVSQEGNRDKEDRLYKLSNLNTNYLKVVFPDCKDTDEISNKIIANIPKILKDYSNFANLNSTDQHILRHSLFLPENHPMRKRVIEEVLMTHNKTKVNGTQGYFCKLLRDELIQRNNGEFNLDFYFQRIPALEVSYYRKTLSKEEQKQEKQPPYSHCIDAMLIFTTGMLNIFDSYSDSNKIENLVPIQQSWKLANVLLSLLTSKSNKNIQDTKQLLHSIYSLIKVNESDHSVIPIERSTRDTINVSHRKLYEDNFYALRIYPLWLGCKKQKKESEIILSYGFNEKTISDLSVKNKKLILKYLYLLSEDSVTKLRNCGISDELMSKKLSDIELIAVENKLQNYFSTSNQKLFWLNIDRAKFLEFYKDNNIYLNKESDKDEDVVYYKVVSNELTYKTTRESLYNIFYDEKGNFNKKKLSKEHIKESTNDPNVEKILLKIYDNLIKSANPDLFADDLKGKNRDIEILKEIFQKPRIELNHRSYKQKLSIPINSKDGAYITYRKGWDNSKVIQISKKSNNVPQKKYYIDTSKLKEQTNDIYNTKNNKSIDVNDIISKHAIEIKKGTEINIKKLLIDFSKYSNFLKTLDNIIIIQITNRLDLELLFKQNVKIDDILKKSIHTLFDIRNIAEEIKKNDDKDVEDRVSEKTIVDKHLLFYSNVNSNSVIMTVKGCRKFMGKSFKKLLPNYILNNN

SEQ ID NO: 47 - protein, 1351 aa, synthetic construct
MSEYYVGLDIGTSSIGWAVTDTNYKLQKFNGKTMWGVRLFDEAQKAEERRIFRASRRRLQRRKQRIEWLQNVFKDLIGQVDPGFFQRMKESYFWLEDKQLDNGQQTKYVFFADKNFTDSDYYKRFPTIYHLRNALMHESSPFDIRLVYIALHHIFKYRGHFLSDADAKAFKASSLADFSTNIQKVNEYLDDAFSDGRCLSVDNVDDLLVILTDQSLSASARFDKICERFPVEKTMEGVRQIKAIFKLLCGLTVKLEDIFDNELLQDGEIKKLDFKSDFSDQEEVLRSQLGDDYFLIDVLKQIYDFVIVRKLLSEGNTLSEAKISLYEKHKNDLKRLKQVIKEHCPDKYREVFKAKDKVDNYPAYSGHESENYRCNYEKFRLFLTKKIFKGLENIPEITQIISELNLERFLPKQTTKENSTIPHQLHELELEAILNNAARYIPFLNEKRGDLSVKEQIIQMFKFRIDYFVGPLNPKSENAWAVHRNTEKITPWNYDSVIDLDKSAEYFIRNMTAKCSYLGEDVLPQNSLLFTKYHVLNSINKIKVNGYPISVEDKQNIYRYFEKTGKKISPRTVRDFLLSCGLLNQSDEIGGLDDELKADLKIFKTMREILGETFDEKMAENIILHLTLFAESPKQAHSWLKSAYGKSLTEDQIKQLSRLRIKGWGRLSSEFLTKIEAVDEQTGEVTNIIGALWETNNNLMELLSPRYGFSNAIQLYKQEKFGSQKMTLSQYLDEAYVSPGVKRSIYQSLEIVDEVQKVMGKVPPKKIFVEVTREEGEKRRTKSRKKNLEELYKSLSSPEVQAIRSYLAQCDEQMIRKEKLYLYFLQLGRCMYSNERIDIVDLESKYDVDHIYPQSKVKDDSLDNKVLVRREENGKKGDVYPLLDSVQDRMKAHWSYLLQVGLLTKKKYERLIRRTPLSDEELADFIARQVVETSQSAKVVADLLKRKFSGKTDVVYCRARHVTDFRKDQVIDKNGEQKHIDQCVHRNFVREQDPLFVKNRLVNDLHHAKDAYLNIVVGNVYDTKFTKNPLHYIKQQGLKFTRNKLFVKDIPGAWIAKGDESINIVRSMMRKNNVLFTRKTFERSGAFFDVTIMPKGKGQRQIKAHDARYDIKKYGGYNKAKGAYFCFVSHEEKKKRKYSIETVFLMYKSLYEKDPVRYCEEILGLSSPVVLVPKIKMNTLFSIDGALLHLSGRSEDRLIFNNATQLSIDPQWHVYIKHLELCSKNDTVTTSSRIASDRNEIFFKVLLQKLTTNAYSKALETFAERMVGTEKIFASLTLEEQVQTLLQFLSIFACRATTVDISSLRINGKSPKQSRIRRNNTVTESKRFVLINQSVTGLFEKELSLNALMTK

SEQ ID NO: 48 - protein, 1341 aa, synthetic construct
MKKYYIGLDIGTDSTGWAATDESYNFLRLKGKTAFGSRLYPKANDCKERRTFRSNRRRMQRRKYRIHLLNDLFAEELNKIDKNFLIRLENSTFNFEDKKDKTSVRTLLFKTFEEEKNYFKNYPTIFHLRKKLLEDDSTSFNDLRNLYLAIHHIIKYRGNFLKEGKLDYSDFNNELLIRLNEILKTIYLEENEEDFDGDFINSNDKENFKTILLNKNLNKTTKKKELKKLFNVSSELCLAYIDLFVSLITGSSYSLKNLKLESDNKISFEENFDEKVLEFEQLLQDKFEIVQIAKEIYDYVSLNDLLKDEKCLSNVMVNVYDEHKKDLALLKKVIINIDKQKNNDHNLYNEIFKNTNNKNNYSSLVKVNTITDKKTSINDFNKELLKIIKENKDFICEEDYNYLVNKLENNELLKTIANVSTGVIPHQLHLNELEIILNNAIKYYPFIATIKDKIIAIFKFRVPYYYGPLDDRSNFSNVVRFNNNQVYPWNINEVIDDNQTRQKFMRRLTNNCRYLFDCKVMPKSSLLYEKFLILDRLNAMEVNGSLLSYKEKEEVFRYIISRNKTTISNLKSYLKKIYNLNDDITINKISLEVPFEAPSHALLNQFFDLETENEKVENLIFLATVYADDKNILKTILEKDISLDKKQINAILSLSTKKWAPFSKELLSGIYYIDDLGVASSIIDIMEKETKNFQVVLNDSKYNFQTIIHDFNKEKRGELTNKEVIDDLLANTPAMFRRSINQTLLILDDIVSITHQDPEKIFIEVTREDLKEDKKKQYDKRQDELKKFLTSLKNDVDSLMKSQSKKLLEELNDENIINKLKIKSKHVYLYFKQMGIDVYTGKIIDLSDVLNSNKYDTDHIIPQSKIKDDSLDNLVLVERTYNQRIKSDAYPIPEEIKTPEILKLWKYLFKIKAISEKKYNNLIRNKELTLQEMEDFVARQINVVNYSNVVLRDVLNIKYPNTKIVFSKAQYASYLRKELKIAKNRNLNDTHHAVDSYLNIVAGNILSTTFSNVRTRYIERNIEEKTFNMERVLNYNLKKNDLANIVKNNCLRHDALVTLKLEYNNSNLYKQTIYKANSSDSLIPIHTNNCMKNTDKYGGYLKFTTHSLAVISYKIKGKEIKKIEALKLMNLKMYKNNFDELIKSLVTEKDATDIKLIKFIGLNQKIQANGGIYYLYSSNEDKNKYKMAYQNYIDNDLLLYFNFAFKKIDQLSEDNTILQQEIITNKYEEHNFIITKEKNKMIFDSLINNSFNKVYDSCNYIVKLRNLKDDNSFNDFSLKKQIEVINQLIIYMSRNSDSSNLKNYFSNLSNARMLLSKNITKNNIYLIHESPTGLYKYKKLL

SEQ ID NO: 49 - protein, 1650 aa, synthetic construct
MPNRLVISPISIDLGSKNSGVYFAHYQAGSFLGEIEKEGKVYQLEKDNFTLMMVDRTARRHQRRGYKRRRLVKRLFRLIWCQEFGLEWDDKTQQAIGFLFNRRGFSFLTEEYDTEALKCFPKDAFNELPKKIQKEIVEIGDTCNLDEKMSEWKQLGQPEITKIFATVDEESKVINRKLLMIGRTNLLKECCKKRIDGKQIEKNKRNQKQYSLSQWIFDEWDDMGIVGLHSIREKGNSVDLAEKLNQQNSSVASEILHSIPNDLDKEKAELNASPWNFNSKKFNLEKSSFERKIVSGNSARIKNKNLQAKKKWIRTHLHHFTFALHTVVQELSTGARHRSKYFQEINDVLECVSHEHGCLNTFCNKLQTGETRIRNGTSLTPESLANLIGNMSNLELKPLRKYFNDKRHKQGDFWDRNRLKKLFGNWILREWRVNPEKDLNKAQDAEFDYQTLRSNWKVHQGSVVDFWLEQSPSFTIPPYQDNNNRRPPKCQSLILNTKFLDNNYRNWRTWLKELLFLPEVNEYLGNYKKEMEELKSGKGTAYFRGELTNKPQLDSGRRTAKDLDARILQFLLDRVKDEDVLKLNEIYSHTKKFRQEQTSPEDRGKARDKLEKAINSSGLSADLKTPRNYKYRAVFAEGSFMHLVCNYYKNRQKARKGRIFIHPEYRFVKGRGFENTGRFDDRDHLLTYCNHKPRQKRYQLISDIAGLLQLPSQQLKERTNSNNDEDLTEWLKNNFKGLKTNCADAAKAQKKFRGHLKEKIREVWDGSNSQDKLFRLAKKCVALCEVIGSRLFDDEAQRQKWIQTLEDRPANAVFLLAQINNIAFKERRGNARTCSVCSLDNSQRMQTFKNNVKAQRLPSIPTRLIDGAVMRLARILGGAIAKDKWARIEKDLLLGTEVRIPIITESNRFQFEPNLLELKRPYLDAKEYNKRKRELDSSLDSSNLKKIQSSKKSRIKGSAQLSPYSGVELGNTGDIDHIIPRAHPKWGTLNDEANLIFTNEQDNRVVKGNSEFSLSDLHPSYKNHVFGTADDSQIEKIIKEEIGNGQGGQFNFGRYFNFIELTERQQKAFRHALFLIGDPLRKLVINTINHRTRTLVNGTQRYFAEVLANTLYKKAKRINKHHLLSFDYFGVEAQDNSRGDGIHNLRHDLVTHYREDLDSYSKSDSSPQKPYSHLLDAQVAFCMIADAHRGSGGLRLELGNTGIWSRVDQMTREVETKKSRVHDDSLFKAIQVNPRNFRKISLERRKPNHQYFKHRSIHRDGMYAEHYLPILIHRKLFEVRIGFDWKNSFQLKNTRQSRKKLYFALKFNPKTKLLALNEDDSFERLEFQLAQIGFNSKMDYFCISLNTQMIHSHYIEHYNSSEGYQDYSPEMNFLRNTLSYRTERKRITKLNDAKIILGNEKNFKLPKDQSYLILPVRNEWAKLIDAWENSPESENGEFLSKFFSPKHQHPHKKFRQDYSLPIKSSGGHRLLKRKSWNNRPIFQIVNDSDSRTTGAKAFIPVCNSEGEIGKLLSESAKSRNTFFLKKEKYYFELSDTVKLIDTDKWHQVELSEDLTKLGLTELKYQIDNNTRPGIRVKFDQLLARGKVDEIFQHSLLKPRYLNKLKEEFQTNLNSNELESLEYTAFGFSKDVKRSLRKVLQQYYFGESDKN

SEQ ID NO: 50 - protein, 1426 aa, synthetic construct
MSHSDVIPSQSLLSSCLALDLGAKHTGAFLVVRDAYRPATSSDCHAMTLVLPDDGDKMTYSAQARRAVRHRLRNKKRHNLARRLALLLIPQKIKEASITLDSTEEQKLIEAICSLLKRRGYSRLESDSATDLTSLENLDPAVFANHSELGQFFCDAADIPSQWENLTQDLQQISAFLNKKPTDKAFKTYFSKNFPDLKSQSKAYSNALKVLSDDANLLLQQVRFGHRHRKQYLEEIHQDMRHDSRLTKAVQAFGDLDRLWRLIGNLSNLQLRAMRWYFNAPELFEDRFWMPERLQKTLIRAFKYFHCEKGAESQNQRQLIKTLESTTDVFEALCTIDPERTIPVYEDQNNRRPPVDETLLLSPHKLTEKFGTIWKTWADSLIKKDPALEENLDLILAYTDRRSRIAIASNPQRYSPLDYRFSYVLQRALDRSKKLDRYALRLLATDAQSQLAHTARAELCRVIGSQHVDAFIEMAKMYYAETADARVGLWIDGQANLLEKSNIHPPMKKRVLNQLVGDVFGLDADFGRAFIENYWNCKLAEKSRSSMRSTCQFIETVRKQFGGEFNLLFKSKTSTTKDITSVKDRIEDVKDFLKNKLQLSERTIERVANPFSLSQLYTLIELDRTGFASTTVAVQLENSWRMSTSDGQNAQCSRLPADCVRPFDGVLRKLLDRQAYELAKYTFDAWKKNVKHDGTTIHHATVVEENKFAFTASLATLKKNTAAKKKATDALQRQEARWLSKDERIKEASQNICAYTGVALDSCICEYDHIIPRTLTKSVLSTAFNSEANLICVSQAGNQQKKDARYRLTNLHSKYLAAIFGTTDCKAIADKIENRIEELKRNRRLRHFELLNAEDQAYVRHALFLDDGSEARKCVLSELAASNRSKVNGTQAWFIRCYLEKLTQLSRDWLNKHHHTLICQAMRTSTDATRKFRKALAQADAVFTKEVIQPVASHSVDAMCAYAAACVSDGFCYFTQSDKQLADFTQVDLLKTLHPQTCTVNWVTSLPLEEKKNHDSKPLFKEGILSEKFLPIITHQGKIFIGFTLPQKTTPNSENAILVQGEDPTYLLRILAPYLNNDVNVNNSSFCTYHINKHRAFELFSKAVLNKSLLTKEEQEATNILEGLRYVTERIPVLKGLINQSGKALIQAPSEFNKSYFNISFKITHTLFGASGTLILPAKADWLKLFKHPDLKDLFGKDLVTLEDIDLENCFQVIHRMNASKLAHTSVKRIPSLPIVRKASGGFRIRRQTLSHDHVYQLYNYETATSGEFACNDNGSVNWKKPILFDHLVNNNVTPFDSKPNPKPVKTVKMRDFRRISEDNDMLVDIAPASIDRRIIRITMNFDKLKNWLTVAKADCQPIHPLDLPVNIKLKEPQLFIPKDLSTARFLGIPRDGKIQFKQIGSRVTFWYTVRNSTDFMNQAFNNAAR

SEQ ID NO: 51 - protein, 1373 aa, synthetic construct
MKEYYLGLDVGTNSLGWAVTDSEYNLLRVKGKILFGVRFFKEGISAADRRVNRSNRRRTQRKNLRLDLLREIFEEELNKKDPLFLKRLDESRYWEEDKKVDSKNSLFNDENYKDKDYFKDFPTIFHLRNNLMGENRKKDIRLYFLAINQMMKRRGHFLIDGNLKDVNDVSGYKERIEYLLNEEFDLDGEDILEKEFFDKIFEVILNKKENKTTKKNQIKEITLSYISDKTKKKKMEEFWNLIISGKNSVKNLFDDENILKELEETNKEKVEIVFFTTDFEDNHEYFENLLGEKIEIIDTLKAIYDFVILQGVLNGAKTLSEAQVKRFNEHKKQLEELKKLVLKYNPSKEIYNRIFKEKNKDLHNYVSYIGVYKGKKEKETIKKISADDFYKFLKKQFKELCSDYESNEDFKEILNEIDKSNYLLKQIVSTNSTIPYQIHLIELEKILENLEKDFPYFTNISDGIKFSEKIKLIFTFRIPYYVGPLNNAKGENSWIVKKEGMKNKKIRPWNFSKIVDEHECEEAFIKRMINICTYLPNEKVLPKSSLLYSEYMVFNEFNNLKFNGEKLSAELKNEIIENVYKRYKKVTIKKIRDYLITNNYATKDIEITGYNGDLHANLASYIDFENIFGNNFDRDMVEDIIEQITIHVGNKKLLSKKIAEKYPNITEQQLEKIVNKKYTGWASFSKEFLSNLKGVSLETGEQNTIIGFLKSQNDNLMQLLSQNYTFMEDIDKLNKESRSDKLSYDVIKELYVSPAVKKMIWQVLKFITEIKKIMGGEPKKLFIEMARADEEKNKQTNSRKKELENLYNGLSKDDKTYWNNQIKEKEEYYFRRNAVYLYYKQLGKCMYSGDPIDLEDILSGKGDFDIDHIIPRHLKTDNSVQNNLVLVKRNLNQTTKKEQYPIPSIIRNNEKVKKLWEFLRSKNFISATKYDRLVRKEELTDEELGGFIARQLVETRQSTKVIKDLVSMYFENTTVIPVKADLANSLRKDLSFAKCRELNDFHHAHDAYLNIVAGDVWNKKFTINPINFIKEINKEGNRNRKYSLYEFFKEKQFSKNRGEKNKIWDPDIAKKKINKVLNTYTLLFTNDTYEQRGEISDVNIVGKKQIKKGTKYLAIKKDDRLKDVSKYGGYNKIKGTYFFLVEHKEKGKLIRTIESLPLHKKVEIKNIADLQNFAENELKLIEPTIIISKIPTKTELEINGFRYLLNGKTDNRLSIQPFMQMFWDTTEMYEIGKLFKKYSYNTKTKKAEDENGENKEKEIFDSSDKENIKKYLKILIERLHKEPFKNRINIPELNINEEMDSIKMFELFKEILNLSRRTLESVNLTSIGGEKTQGKTRINKKLNHNDSIKIILKSLTGVYEKKVDLNKCLGEQL

SEQ ID NO: 52 - protein, 1397 aa, synthetic construct
MESKNYYIGLDIGTDSIGYAAADESYRLLKYKGEPVWGSHIIEEANLKTERRQHRTERRRLDRRQQRVTLIREIFAKEIAKIDPDFYKREEESALLAEDVSTSKGLFTDIGYTDKKYHKSYPTIHHLINELMTDAAPHDVRLVYLACAWLVAHRGHFLSEVSLDNVESVVDFKTVYDNLTDYFAFEIGCEPAWDNADPDEIEKILVKKIKSTSKINELNNLLFGKKKPETEITDAFPFSRPGIIKLLCGKDCSAKDLFGKEEYAEIKSLKLDDDELDSNLSELGDDAELVLRLKAVYDCVTLHDVLGENKFISAAKVEAYEQHKRDLAGLKKFIKKYAPEKYNEIFRKVDKSTANYSAYSGNIKSDKNTKADWKKATPENFCTYILKIVNNITPAAEDKAFFDDMVARLQKDVNTFMPKQVNGDNRVIPYQLYYVELKKILENAEKYLPFLSETDEEGYLTKDKILSVFTFRIPYYVGPLNASSPYAWIKRKAGRITPWNFSEMVDGNESEQGFINKLIGVCSYLPGEKVLPKQSLLYQRFTVLNEINNITINGLRISPEIKQLIYNDVFKKNKKVSVKKIKDSLRQNNHSKDDVETIAGIDISIKSSLSSYISFRRLLESGTLNETDVEKIIKVSTYMESRPRFKAWLEGEYPNLSDNDVKYITSLKFKDFGRLSEKFLCAILGSRKNNEKEDNGEASSIIDALWNTNKNLMELLSDDYTYSDAIKRYSDNYYMANGVKSLDERMDDMYLSNAVRRPIYRVLDIVSDIVKAEGKAPNKIFVEMARGAKPDEKGKRTTSRCGMLKALYKTIDTDDVRRLEQELEKMGDEANSRLQSEKLFLYFLQLGKCMYSGEEIDLNNLMGKRYDIDHIYPRSKVKDDSLFNNKVLVKSKINGSKDNNYPLPENIRENMSGMWKKLLDGGLITEEKYRRLTRKTGFTDDEAWGFINRQMVETRQSTKAVATLLKEYYPNTEIVYVKAGLVSEFRHEKKLWKAILPEEERYLDDSQIEPWKTELWKSRTVNDLHHAKDAYLNIVAGNVYHEKCTKPWYLSNKDNYSINLISLYSLTPYMVGERKIWDGVNSLETVWKTVHKNAVHYTIYPFSRKGGLFDQNPLKKNADLIPRKKDLPAEKYGGYNSPSVNFFVLVKYYFDKNSDVMFMPVELSVAEKYMSDLNFRLSYSQKQLGKILNKDKKADKKLKISRVEFPLGNRIIKINTMIELDGYRMCITANSSGGAEIKVSSMTPLCLAPEWEFYIKKLETFDEKKNNNPNMIYMEKYDVVSPEKNVELYDILIDKLSNTVFKKRPVNPCDDLADGKAKFAAQDVFKQTKCLLQIVGIFGRINNGFDLRAVGGGQYAAKSRRSTNLSNWKKYYSDVRIIDTTASGLFEHRSCNLLDLL

SEQ ID NO: 53 - protein, 1334 aa, synthetic construct
MKQNGNNEKIKEYYVGLDVGTNSCGWAVTDPEYNVLRFKGKSMWGARLFDEAQTAAGRRTARTARRRLARRRFRLDLLESFFEKEITNIDPLFFRRLKNSNLYEDEIKAETGAYSLFNDKGYTDREYLKEYPTIYHLRSELIHSTKPHDVRLVFLALHHLLKKRGHFLYDTGDNDNFKNIDTALDDLQQYLDENGIPFEIQNKEEFKRALMSRIKLSEKKKKLKEVYGSIIDAEESDIDVAELIDSLSGAVIKLSKLFCDETLKETEINSLSLGDDLDEKYDALSAALAERLDLILLLKNIFDSARLSILLDNKNYICDAKKALYEKNKNDLKLLKSYIRRTNKSAYRKAFYPKEKTNNFAAYTRYKTEYQCNQEDFLKFLEKEYFKEKEELLTPEENRMYEEIKAGTFLTKLKGSENGLIPYQLAYKEVKKILENASAYLPFLKEAQADGLTTAEKIERTFTFRIPYYVGPLNKKAKHSFIARTDEKIYPWNFERVVDLDASAGNFMASLIGRCTYTNEPVLPLNSLLYSQFAVLNEINRISVNDEVIPVEIKQAIYQDLFVKSGRNVTKKQIFRYLKQRGLISDADKLSGIDDNVKAKLKSLHDFQSILENGLTKDNREMVEEIIEAVLVYSDDKKMLRRWLEKNIKELSDEEIKKICRLNYRGWGRFSKTFLQNIYHVDKNGEAHSIIDMLWETNENLMRLMSDAYSFQQKCMNYKKEHFDSGESIRKQLDDLYIAPSVRRSIWQTLRVVDEVVDIQKGAPAKIMIEMARPSKKDTKKQRTISRKEKLIALYKACDEQKDELFDRLNQETDESLRRDKLYLYYTQFGKCMYSGEKIDLTEAMKDDETYDIDHIFPRSRIVDDSIDNRVLVKSKLNRDKSNVYPIAEEIRQKMQPFWEVLHSKKLMSDTKYNRLIRHTPLTDEELSSFITRQLVETNQSTKALATLLQQLYPNTKIIYSKAKNVSNFRRKYKDHGLIKSREINDLHHAKDAYLNIVVGNTFATKFTDRFFMHIHENAAKNSYSLTKIFDHDTKGAWKSDGTSLKTVEKYMNKNNPIVTFASICVKGELYDQQPRPKAKKDGSLFPLKKGKPVEKYGGYKNPTGSYFYIVEHTKGKKTLTTILPVYLYNVVEYERDPIAYSCQMHGLVNPKIIVKKLPKNSMLEFDGIRLLITGRTGSNNVYMHNYQFAVDKTHVEYIHNIEKYVTRYETKKPPVVVSVYDKISTKGNIDLYDWLCERMRMNPYKQLFKGLLKDLEAGHEKFNALDVLAQCKIILEILKSFKCDRQITNIKELNGKGTAGILKKASNISSFNKVNVIVQSVTGLYEYKRKILG

SEQ ID NO: 54 - protein, 1351 aa, synthetic construct
MGKYYLGLDMGTNSIGWAVTDENYNLIRKKGKDLWGVRLFPEAKTAQERRSKRCERRRRQREKARIGCLQEMFADAINEKDPGFYQRLEDSRFLIEDKREHQPFVLFADRDFTDKDYYAKYPTIYHLRKELLQSKEPHDVRLVYLAVLNMYKHRGHFLNTTLTGGDSTDEFESLYKSLVEKMGRVREEEGVDDFLCVDLKNVLTDKRFSKSRKVEVIREVLKIDKKDKIKTDMWKLICGLQVALANIFPEESMSDEFKKYKLSFDDSGCEEKMLEVEGMISEEAFDALLIMKQIHDCIILADIMAGGNKKYHFLSEARVASYEKHKKDLKLLKKIYKVYLPEKYDEMFRKTEKDNYCAYIGSSNVNGKVRRRNEHCKIEELYARIKKETGSIAANSDVAYILEEIEKGTFLLKQMTALNGVIPNQIHRAELEQILKNAAEYLPFLNETDKDGMTVSDKIIALFKFQIPYYIGPLIKTEKNNAWVVRKEDGKVYPWNLEQKIDVKMTAEEFIGRMVNHCTYLSGEKVLPKNSLLYERFMVLNELNNLKINGQKISAELKQELYKELFGNGKKVTGKRIKTYLFSHGYVSSDMPVEITGIDGDCINRLSNYKKFLEVFKTETLTYEQEKIAEDIILWGTLYGDSKHFWKEKIEEKYGEILTPEQKKRILGYRFRDWSRLSREFLCLEGESKQTGETASIISRLWNENYNLMQLLGDEFTYKNVIEERTNQINKVLSEIQYEDLMELYISAPVRRMTWQTILILKELQKVLGRYPDKIFVEMAREHRKESGRTVSKKRKFEELYKKCGEEAEQWLREIEVTDEYRFRSKKLYLYYTQKGRCMYTGERIELSELFNDNRYDIDHIYPRHFVKDDNIDNNLVLVKKEKNAHKSDSFPIESGIQKNQLTWWNLLLEGGFITKEKYNRLTRKEEFTIEEQTAFISRQIVETRQGTKTIVDVLKKSCPETDIVYVKAGNVSDFRNHFHVIKCRSINDFHHAHDAYLNVVVGNVYDVKFTRSPKNFVEAYRRDPVHNPYHMDKIFDFNVKRGSVTAWDTKKSIRTVRSVLDKNSPLVTYMNYEVHGELADQNPYSASKAAKVQGEGYIPLKTSDSRLANVQCYGGFTKYTGTYFFVVEHTVKKKTVRTLEAMPLYLKANMNKIDEIEKYCRNQLKYIEPQIVCSRIKMYSLMKIDGYYAYISGRTGNQILLVNAIQLVLKREYQDYIKKLDDIFEKGLDNSALEYQKTITKEKNQELYRELLYKHKDGIYGRKPNPVGEKLEKGKAVFKNLSIMEQATMLREILKLSQRLNEGANLALFGEGKKCGITKMNKEITGLKECKVIHQSVTGLYVTETDLLNI

SEQ ID NO: 55 - protein, 1333 aa, synthetic construct
MAKKDYSIGLDIGTSSVGWAVIDCQNYKVLRKGNQKLWGVRLFDEATTAETRRLARGTRRRYDRRRTRIKLLQEEFQNEINKVDSNFFKKLKESAYHEDDKLNKTIILSQEEKNKIKKYNDLYPTIYHLRHKLISSEEKMDIRLVYLAIHHIIKYRGNFLYGASNFNTLNLNMEELFDNLLKDLNEITSIEKTEDLSLVNAKKLEEFLSLESKNDKKLELTKEFSQAISKKQTAELVKLLIGDKSNLNVLFNTESEEEIKVSFKGSEYEDNEDKIIKNFPNEIDIIEDVKNIYNAQFLLNLFKGRKEQNLSYVMVDNYNIHKKDLQTLKQIYKADKNLYKKMFKNENCIYEKYITNNMTYDDFKKEIIKSLEILNPINKEDLLEKLEKENFMPRITSVDNGKYPYQLNESELIEIIKNQGQYYPFLLDKTEDEKYKLVKILEFRIPYYVGPLNNTTSKKGVENKNSWLVKKKDNVKITPYNFNEVIDLESSAEKFIKRMLGTCTYLLKEPSMPNNSILYSKFKVLNELKQIKVGDENKEQKLSREMINKIYNDLFLTTKGSITDKKFKEYLMQTGEYTMYSNLSVTGYSADKKIANNMSSYLDFFGENGIFTNTNYSVEDAEKIIEYITIFEDKEILKRKVINEFPTLNEEQIKKICRLKYKGWSNLSKKLLTEVYYIDEKTSVPKNIITLMEETSQNFMQIITDKKYNFEEKINEINNSKNSKKLSYELVDELATSPKNKRGIYQALKVLNEIIQYMGYEPKRITLEMARGEEENKRTVDRKKVIENAYAGNSEEIYNYSKLKKELGEIEKIESHNQKLFLYFLQEGKSLYSGTPLNIEELEKYEIDHIIPRTLIKDNSIDNLALVTREENQNKSASFVLPENYRTSKMKVWWNHLKKLKLISDKKYNNLIRDKFSQETIEGFINRQLVETRQICKHVANIIKNMYEKTEIYYIPANLSSNYREKFELYKFREINDYHHAHDAYLAATLGEYRTYLKSNISYDYLKRINFKSYQEKKYQELNAGYVINSLVNADNYTELFCDPNTGELLFDAKEFNKAIENTLYQNDILVSKKVEFKTGELWQQTKNKKGEKGVPLKRNMPTEKYGAYTSISPAYAAVVKFVKNNKEDQRMIGIPIYIDITSKENKNIKIEYIKNLLNADEVEIIKDKIPFYSKLNWNGAICSLVGATDKVEVCNAKEFNIDKKHMIKWKLTLVRLFNGKKEIIDNATYNENLEEIIEYIVSKIEKEYILYQNLLDQMKEMFKINSTEKLNPEDKEKVILEMFKLLKCNSACANFKFLNESIAFGKKNGRIINDGIIINQSATGLWENYYEF

SEQ ID NO: 56 - protein, 1380 aa, synthetic construct
MNLRNTKNYNIGLDLGTSSVGWAVTDDTGALLHFKGRPTWGSRLFSEGKTASETRIARGQRRRYDRRRQRLDLLQTFFYDEMEKIDSEFFLRLRQARLFPEDRDPSHADYRWPLFNESNFTEKDYYKRFPTIYHLRKHLMESDEKADIRLIYLAFHNIVKVRGNFLHQDNPNLSAKNANMKASIDRLSEVLRAWYDEREVACEFTPRDILAILEDQAADSFRSVKRDALKNAFTFDGDHGKIASELGKAFVGYKADFASIFLLESEKASFSLSNDEAVDEFISSQCPDEGADLFEALRAVHSAFVLSGILRGGNGETISFCKVNDYERYGNDLKLLKQLTREYAPEKYARFFCGTHYDAPFHKNYDASQAEGYTKYNLGQKKSEYKSSSMTYDDFKKAVEKLFKGTPAESDDRYKEMMQGFDEGTFLRRLKTSDNGSIPYQLHLEEMTAIIAKQAPHYPFLAENQQKIESLVSFRIPYYVGPLTTKNAAVDGNQNLRFAWAKRLPGKEGERIRPWNWDQIIDRTESAQRFIERMTGTCTYLHGEPVLPKCSLLYEKFCVLNELNGSRWSQDGDDEKRFSADDRSKIFELFKHGSVSYEKVQGWLRQNNRLNPHVMGGQGETKYESKLSSHMFFCRLLNVDDLDATASAMAEEIILWNTLFEDRKILKERIEQTYGGQLNSAQIKAICKKRFTGWGRLSKKLLCELKVPTDSGLKSIMDILEEGNPSNGHLGRAMVLMEVLRDDRLKFEQAIDAANKEALQSGGGLKVEDLPGSPALRRTINQAVRVVEEIASITKKVPANIFIEVTREDDGKKKGKRTTRRYDTIKQALKSLRAEGEDKPEILSELGRRKPDELDEKLTLYFMQNGKSLYSGEPLRIECLSEYQVDHIIPQSYYKDDSFENKALVLPGENQRKSNALLVEQSIRTRMEPFWRTLRNHELIGEKKYRNLMRDRVDENQMKGFINRQLVETSQIVKFTQMILSDRFPETKIIPVKAALSSQVRSACGFVKCREANDYHHAHDAYLACEIGRFIQLRHPDIYDNPIAYTRMMRDFVRARSEELKRTGRMPGDATFLVQSFLRSGFNRETGEIFKDAWDAEAEIARIRRFLNYKDCYISRMPEIHTGAFWGQTIYSPHSNETKLLSLKKGLNTEKYGGYSNKAFAYFFIYSGVKGRSKKYAIAGLPIYLAKTVAEDEGNLLQYAQALGAEKEVSDIEIVASPILYNQVVRYQKDEFRISAEDVVYSNRQLFLPTAYSKHLAALGDNAISEGDGPLYDELYSVIIDKMDVLCTRFERIKQTLVNGKNEFLNFEVSEKKEFIKQLCAFCNGGTERRKKARINISRFGGSPNAGGMGNGFILSSISELEIIDQSVTGMFESRRRLEL

SEQ ID NO: 57 - protein, 1357 aa, synthetic construct
MNMNSTDYYIGLDCGTSSVGFAVTDVDYSILKFNGKAMWGSHLFEEAKTAQERRGARCARRRLQRRKQRTALLQEIFAEEIYKVDPTFFIRLNDSQYLEEDKRIPGRNIIFNDKDFKDKDYFRKYPTAYHLRKTLMEEKVADPRLLYLGINHILKHRGHFLFPGDNLKAVSDISPVLDSIAEAYNDIFGEQLSFSSNEDIEKALLNKSSISKKEGLESGISLHDTKKKALLVKAILGYNTKPHQLFDNEEYKECPAIEFKKLSFEEKDLPEIEETVSDDEYKLILNLKALFDWGLLARIMQGNKSISEAKVCLFEKNKDDLKILKEAIKTYAKSEYDDFFHSMDNGKFSSYIGKNHDKRKGKEGRCKKSSVDDFYKTVKKILGNAPKEDAGVKHVLNSIEEDSFLPLLSSYRNGVIPYQVNKAELESILDNASKYFDFLSRKDEDGLSPRDKILSILTYRIPYFVGPLGSNADSDAHGWLVRKEKIGRILPWNIEQKVDYEESAERFIKRMTNKCTYCKTEDVLPKNSLSYSKFMVLNELNNVRLNGERLSVERKQSVFNELFKKRKKVTKKQVVNHAIKEGWYGKDDLSVDGITGIDEDFKASLGPYADFRSWIEQGKLKADDVDEIIKWITIFSEGGDILKNRIKKFYGDVLNDNDINAITKLKYAGWGRFSHKFLYEIQGMNKETGELMSIMRMLWHTQHNLMELLGNDYEFIEQVDKPQILGKLDYDVVDDLHVSPAVKRQIWQTLRIVDELRRIMKHDPRKVFIEVTRSEQEKKRTVSRKKDLIDKLKEAEKGGLGFGIEVQKLISSLEGKDESAVSRQDKLYLYYSQCGKCMYTNEPIDLDDLYNTELYDVDHIYPYSKTDDDSLKNRVLVLKKANLRKSDSYPIDDSIRHKMASFWKMLSDKGFIPKEKYERLIRTSPLSEEEMKGFINRQLVETSQNVKATAAILKSFFGEGTKIVYSKAGKVSDFRDQFDLVKCRSLNELHHAKDAYLNIVVGNVLDTKYTSEFYKHADGRGYGNVARPFDFDVKGAWLRGSGGTIAKVRDILNKNNILFTRQPVARTGALFDLQIVPKGSKKGALPVKPSEPRLKEKLQGLDDATGIYDEWTSKYGGYNSMSTSYFALVKHADKKRSYASFVPIAMIDAKRLSEPEQLLAHCRNVLRLENPVIVNPRLLMNTQLEIDGYRFSITGKSSGGKVITLVSSIPLIISQESQKTLKKIEKFFNRKKIYKDIEIDSKRDGITEDNAAALYQELVNKSSYGIYNKKPSNQSDLLKNSYEVFESLGLLNKCNVINELVNYFAMGVGKADLTLINGTKACGVLTKGAMIDLGKTDLCIIYQSITGLFETREQIKA

SEQ ID NO: 58 - protein, 1373 aa, synthetic construct
MEKEDYFLGLDLGTSSVGWAVTDTQYHLKRAKGKDLWGVRLFNEASTAAERRIKRTSRRRIEREKARKAVLKDFFADAINEVDAGFYLRMEESFLKFNEKRNDRSEGNQQPFSLFNDKDFTDKDFYEKYKTIFHLRKELLHSIEPHDVRLVFLAIYNMFGHRGHFLNSTLDPTKSESKIDIAYQEMVEALKLVNVNILESIDYDKFEKILSGRGKSRSRICEELGDFFAIEKKDKVRYSILKMLSGLKVPVKEFYNNNNEDLDEESQKKSVSFREENFEETFDEIHTIVGDEWFNALENIKTVHDIGMIANIMHGHIFLSDARVEIYEKHQQDLKQLKSLLKEYNMKGYESFFRTIDKGNYSAYVGSVYSHGKLLRRKADGRKKEDLYKTIKGLIKGIPDDNADKKDILEKIDSESFLEKQLTGSNGVIPNQVHSRELRQILKNAESYLDFLKNKDEKGLSISDKIIQLFEFQIPYYVGPLGMEFNGKKGYNCWAVPKEKDKKIGKIYPWNFYEKIDEAASRKEFIERMVRKCTYLNDKVTLPKKSLLYEKFMVLNEINTIKVNGKRLTTELKQGIFKELFGKGKKVSKKRIKEYLVSRNAMEEKWEIEGIDKDCNQSLTSIGKFYGVFGEEVYNDDNKALIEDIIYWGTLFSGDKKFIKSKIEENYGNRLNEEQLKRILGFKFEGWGKLSRDFLELQGISKETGEVNSIINFLWENQVNLMELLSDEYTFTDELNKKIISSEKPLCQWKIEDLDDMYISAPVKRMIWQTMKIVDELQTVLGYPPKRIFVEMTRSDEEKVRTVSRKEKLAKLYKKIEEEQSVWNKELELKDESYFKSRKLYLYYLQMGKCMYSGEPIDLSQLMNDNIYDLDHIYPQHYTKDDSLENNMVLVTKEENMKKGDKPIPREVQDKMYKFWLELKDKEFITDEKFSRLTRRNKEFTREEKVGFINRQIVETGQATKVITQILQQSMGDECKIVFSKARLVSDFRKKFKIPKSRIINDLHHANDAYLNIVVGNAYYVKFTNNPMNFIKQSEKNPDSEEYKYHFGRFFEQDVKNKNETAWIAKDSGCTIVTVKDTLRRNTPLVTYKVEEGHGQYFKETVYGTDKAKANSYIGIKTKDSPLNDVAEYGGKTDVATLGYCLVEYRKKNKIIRTLEELPVFLGESRSLKDENVLNYLREKFIKEGNPEAAESLNLIERFIPKQSLIKREGYYYYLGGRTNVQVYLYNAMQLKLPLNLVKYIKKIEKANSKSDYSEIDNQGEPVITVEKNQELYKILMSKFKEDPYKNRVNPINKVLENGLNTFMDIEIANQCKIIEVIILNISKSNTMNLKGIGEASSAGMCLGSMDISKLKEFKIIHQSVTGLFEIEKDLLK

SEQ ID NO: 59 - protein, 1103 aa, synthetic construct
MEIRFALDIGVASVGWAVVNDTYEVLEAGANIFPCADSSKNADRRGFRQLKRIHRRKHTRIRDFEILWERQGWNMEKIIISEVLPLRVKGLKEELSENELYNVLRNELLHRGISYLEDAIDDTVSGSLYEKAIKNNQRQLEKESFPCVIQWERLKKYGKYRGNQSVNIEGKEINLSNVFTTASYEKEIEKILNTQKKFHSILSDEFCQQYIDIFRRKRKYYEGPGKENSRTDYGIYTTQKDQNTGEYLTYNNLFERLIGKCSVYPEEYRAAGASYTAQEFNLLNDLNNLTVNNRKLIKKEKEEIVEAIKTSNRIDVKKIIENAIHEKIDSLTGMLLDDKGKECMHKFEQYNLVRRNFEKNGLDFEKITRTDHDLIGEILTLNSDYGSILESIRDKFPDLSEKEVKVLYEIKRKNGSLFSKWQKLSLKAMNELIPDMYDESKNQMVLLTERKLIKTNRKQCMESKYINCNIAVAQIYNPVVVRSIRIAVRIVNALLKKYGNPKQIIVEMPRDKNDDEQRKKLDDMRKANERELNAIIKEIKEQYGENISDENFYYQKELALKLKLWREQDEKCVYSGKQISIKDLLYNPQLFQIDHIIPISISFDDSRNNKVLVYDIENQKKGNKTPYMYLSQLSRHWDFEQFKAYVKELYARKKIQRKKLENLLYMQDVTKYDVLKKFINRNINDTRYASRVILNLLQDYFNAYQISTTVRVIRGSFTHQMRKVLRIEKDREESYDHHAIDAILMCYSQMGYDLFYKKQSEFIDWETGEIVDELAWDKLMDSEKYQEIMYQSKYMKLRKNIAEGKEKIKYWHKVDTKPNRSLCNQTIRGTRKREGKVWKINKLNIYDQNDVKTLRNKIEKGKSSTFLMYQYDRKSWDQMIEILDLYRDSKTPFSDYEKETGDFFRKYSKSHNGPVITKIKYQDGELGSCIDISHKYGLKKGSKKVVLESLTPYRMDVYYQSMTGKYYLVGLKHSDLKFEKGQYKLNEEAYNKALVAEKVIPEGKSRNDLGMMGIEFCWSFYRGDVIEYEKNGEIKRELFWSRTMPKNSNYIETKPISAGKWKGKKQNFVGLAKTKYIKKIRSDILGNQYVCNKEKFIMEVDKS

SEQ ID NO: 60 - protein, 1354 aa, synthetic construct
MERYYLGLDMGTSSVGWAVTDEKYQIVRKKGKDLWGVRLFPEAQTAAERRTNRVARRRRQREKARIGYLRELFANEIQKTDPGFFQRLDDSKYFQEDKMIHQPFALFADSGYTDKEYFQEYPTIYHLRKELLTSTEPHDVRLVYLAVLNMFKHRGHFLNASLTDESIGNLADLFENLRIAVKDQLDVELAYPERMEDLENIFIDKSLSKTEKVEKIKALLKIDKKDRLQAELWKMICGLSGTLSVIFRQDNFSEEDKKYKLSFRDGNYDEKINAVAEMLSEESLDVLMLIKQIHDWGVLADIMRGSGKTYEYLSFARVDSYEKHKKDLETLKYLYKTYAPEKYHDMFRVMKDNNYSAYVGSVNAGNHVERRGYKHKTEDFYSALKKELQNFPESAERQYVLNEIEKGTFLPKQLTASNGVVPNQVHMKELKKILANAEKYLAFLQQTDETGLSVSEKIIQLFGFQIPYYVGPLVNKADNHAWVVRKEGGRVFPWNFEQKVDVKRTSELFIQNMVNHCTYLSDEYVLPKNSLLYEKFMVLNELNNLRINGEKISVALKQDIYQDLFKSGKKVTAKRLCDYLIVHGYVDNETPIDLSGIDGDFVNRLANYKKFSEVFYVETLTYEQEQMAEQIIFWSTVYGDSKKFLREKIQENYGEVLSSNQIKRILGYKFRDWGRLSREFLLLEGADKTTGEISTIISRMWNENYNLMQLLSSEQFTYREEVEKKTKHMEKTLSEITYEDLEDLYISAPVRRMTWQTILILKELCGVLGQYPDKVFVEMAREHGEKNTRTVSRKKKFMDLYKSCKDEEIQWAKQIADTEERKFRSKKLYLYYTQKGRCMYTGTRIELSDLFNDNLYDIDHIYPRHFVKDDNIDNNLVLVKKQVNAHKSDVFPLERDIQKKQAAMWKELRQGNFITEEKYKRLTRNDPFTEEEQAGFISRQIVETRQGTKAITDLLQQTCPQSKIIYVKAGNVSAFRQKFDLIKCRNVNDLHHAQDAYLNIVVGNVYYTKFTSSPRNFVREYRQNKEKHPYHMYRLFDYDVRRGEEVAWEIGKDGKGKSISTVKRMVLKNTPLVTMMNFEVHGGLADQTLYSAKDAKDGEGYLPLKSSDPRLRDVAKYGGFTKYTGTYFFVVEYGQEKKRIRSIEAVPLYLAERLSDRENLEVYCRDMLGYQDPKIICRKIKMYSLMKINGFYLYLTGRTGTRLNVVNAVQMILDYENMYYVKRIADASERKYTDEDYEEHEVISKENNLRLYRQLEEKHRDTIYQKRPNPMGSKLQEMEGRFEELSIAQQVKVLLEILKLSQRLNQGADLTLLGGAKKTGTSKIGKKISELQECKVINQSVTGMYVNEVDLLKK

SEQ ID NO: 61 - protein, 1344 aa, synthetic construct
MHKKLIYSISIDLGAKNTGVYFASYEERSRVDNIKSEGKVYQLDPNSYTLLLENRTAKRHQRRCFDRRQLVKRLFRVIWQKHFALMWNDETQQAISFLLNRRGFTFEPENENERHRRCYFEEIKKILTTTNYPHRYLKHFCQKLHTGKFKGLDEKKLANLIGHLNNLELKPLRWYFNDKRHSQGDYWDKNRLQEIFIHWVINTWRIDKQKDNQHDNQKEKKTNGEYNYRKLKNNLQHQEDIIEFFLTTDPKRAIPPYQDNNNRHPPRCQSLLLNRKFLDDHYPQWQMWLRDLKKLCPDPVKDFIDSLQSLMSSGDKPYFVESNSVYCQSISDLDARILQFIFDQAKDSDPFKLNEIFAYTKKLRQLQSSSQEKEQAREDIERTIESSKLSKNLKTARNYENEVFAEGSFLHLVCRYYKYRQKARAGRIFIHDTNDVFLTYCDRKPRHKKHQLLDDLASLLRVSRTRLRKVIGSNDNSTDEARVTAWLKNFTGLKSNAEKSCDEQKKYRGNIKTKIEGVYFKDQKNASLYKVCERSKKLVHAINCQLDKPKDTTLDNNPAKAIYTLSQVHNLIFKDRSGNANTCAVCSADNAQRMQEISGRAKAQRLPAINTRLIDGAVKRIAHIVGGAIADEGWKHIEQKLSQGQAVRVPIITESNRFEFEENLGVLKKKAKKYGKQPDFFVEKEKRIRRASQGVCPYTGADLDGGEIDHIIPRSSETGTLNDEANLIHASKEGNRQKSNKKYFLSDLHAHYKRKQFDSTDDNEITRWIEEQLGGDKKYEFKFGRYSNFLNLTLDQQKAFRHALYLPTNHKLRKLVIKTIDHRKQSFVNGTQRYFAEVIARNFYQKAKKLGKARQISFDYFAVEARSSTRGDGVSDYRRQLEKDDAILQKYSKDPSKKQNPYSHLIDAQIAFAIVANNHKRDGGLKLDIADHLDPEDIYKKIRLTDSNIYCDKLKRKKPTETFCSHRAFTRDTLYADHYLPILLKKETDIVCRAGFTWKNSFKFESKDNQNLQKLLPLCAHLPSGIEIAALYDKLAILPKFKEQLHRHGYYYLCVDKQKLHDFWLRGRDDTGAFSDKEFFGFCWSTIGYRTENKPIARPKDLVDILQKDAKFKVGKNECVELPVKKEWQRCLTAWQNSGKDDKEFLCFLQEYFKAAPNHKHAHQKTRNVYSLPVKTGEGKLLLRRRNWNGKHTDQIINDSDSRSVDNKPCLPVRTSEYKKAERLAWWAQTKNTVKLSTDTYHNGEHINSERWYPIECQDFPTGVKGIEYRVDDCTRPSIRLVLERSKAIVADGILKHPLCKAKEKSKAKSLIEGSTGTDVEYKASGYNREITSALQESLRKHHS

SEQ ID NO: 62 - protein, 1387 aa, synthetic construct
MRKKVEDYAIGLDIGTNSVGWAAIDCDYKLVKVNGRDAWGVVLFESANPAKDRRVFRSARRRLERRRMRIRLLQELMAEGIEPVDPNFYIRLKESSYHVGEGKYFRSNHFNLFDGGEYTDAQYFHEYPTIYHLRKRLVENKEKADIRLVYLAIHHIIKYRGHFLNEGGMDSAGGSPEVAAGELFGLLNENYKKDLFYIGKEEAFTQALLDGKSSRSMRQENAYNVLTSEKKDKFVTALTKAVTGLKANLTDLLCLEDEEDAIKDENDKPVSICFADAKYGEEKEDKYYSLERADILLAAEKLYAAIELNAVLRGKKLLCEAMVDKFRKHAEDLAAIRKLIRGMGDKALYNDFFRKGKGANYTGYIGDKRYGFYGDRGDVCKKTTKEDLYKRIREILNKAPESREKEYIEKEIIKEDFLPLITSKDNAYIPYQLNLKELDAILENQGKFYPCLAENADKIRALLTFRRPYYVGTLKGKFSWAGDIELPEEEITPWNFFKTLGEDRLDKLAENFISRMTNDCILIKGEDALPLNSMLYQKYVLLNEINKIKVFDKPISVEWKQAIYELCKKRKTVKKSDIAARLNKKFNIQTTADNIGGLSDEKKLTASLSTYVDFVKMFGEEFVKANFDALEEAVRILTIFNDTDIRKKRIKELKVFEGFEERLAKKNFSGWGKYSRKALYGTLGNNGKCVLDIMYETNEHINEVLWKEEYGFKEKFVDETEPIEKFVYEQVDRMRISPKVKRGVWNAIRLAEELAKQIGCDPKYIFLEDTTEIGEKKRTKSRYDKVCEFYKALKDGGYKDIIDEENMKYCRSELAKYKDKKSAMDEDKLYLWFIQLGRSMYSDTKIPLEKLPECEIDHIIPRSLIVDNSFENRALVLKKENQAKGDGAMSVDIVKQMRPFWKFLYDNKLIGSKKFTNLQKTEITEKDLAGFINRQLVDTGYIVRLVKELLMRRFPNAEVRGVKPKLSSTIRKRFASDHTYFNGQEYVTEKGKAGFYKIRSLNNFHHAKDAYLASVAGLFTTYSCPLWGNSEYNKAINYYIKNPEKSKYNTKGGDKESQEKANSRTTATLINKRYGFIVNLMMQTERPDLFALDEKSGEYLWDTNRYNNMLETMARNTCNVVKKKQYMAASDFYDQTVYSPKSSKKGLIPLKSHGGEDMPTEFYGGYSSLSPAYFIAVQYTKKGKVKYAFGNIPVKIAVNGTAAVDKYVREMYGDEAKVVRKIYKYQLINYEGQQVCISGNLDLQNATEIYVAPKFEELLWLVEKGKVDILSGKPDKEGEIKDFNGLIKEFIPHICYIIRRKLPLYANLVDKLEQIDKEYLDEMTMEEKVKLLSDVMLACHTGAGSATLDKRLGGESFGRIRKVIDPSKVDWIDKSLTGLYTRTTKGV

SEQ ID NO: 63 - protein, 1115 aa, synthetic construct
MNNNYVLGLDIGITSCGYGVVDLESRKFVDYGVRLFKEGTAAENEKRRSIRGRRRLISRRKTRLKDMQKLLKKNGIMSENYKSLNNIYEIRCKGLTQKLTSDELTAAILHITKHRGSVLETVEEDAEKSVDTEGLKATLQRNEQLVRSGKYICQIQMERLKEKNKIRNHGNNFSTKDYLDELKEILDHQNLNDDLKKSIVEIVLRRRKYYEGPGSEKSPTSYGRFIEVDGHIEKIDLIEKMRGKCSVYPEELRAPKMSVSADLFNFLNDLNNLTVTGNKLSTDEKESILSIISEKGNITLRQFAKKLEVSEDDITGYRIDKNNKAIFTEFKGYKKIKSILEKEGRSVSLKDYKMLDKIIEILTNKKGIEDRKDDLANADIGLNDAQIEVLANTTGIVGYHSLSFKAIRLLNKELFETEMNQMQLLHELKLFDQNRKSTKGKKNIETDDEAILSPVAKRAQNETFKVINALRKKYGEFNSIVVEMTRDKNSDEKKKRINQFQKNNENSSKDMDKFLKEAGFDPEKINGKTRMKIRLYLQQDCKSAYTFQPIDLARLIKDPSYTEIDHIIPISISLDDSQNNKVLALHSENQQKENLTPFMAFNSGKFKGMGCTYSEFKTNVLANKNIPYKKKLNLLNEKDITKLEVVKEFINRNLVDTSYACRTVLNTLQDYFKDNGIDTKVHTVNGRLTDLFRKRIHLPKDREEDFLHHAVDGLIVASIKKSNLLNGYLSKHEFSDLYDEITGEIKTIPDDKQFYDETYIRFILELKTIYEESNKYYNHLIDKADMLFYPIKISQKINTKPNRQIADETIYSTRKYDDTDYLIEKIPDIYDPKDKKCKRLVENILNGTDNIYLMSKHDPQTFQLIQDIVKYHYGQFKDDGETYKVVEKKGKKKIILNGENPLTSYKNENGFIHKYSKKGNGPAIVSMKYQSEKLGNHLDITKNYDAKNKKVILKQISPFRTDFYKCEDGKFRFVTVRYSNVKYKKSMKRYAIDKDWYAVEKEKKGIKSKDVFLFSMHRDELIGIVKKEGDKYIFDSSTESNGKTMYHDGIHPEILKFTATNNDSENRIEVKPRYTSCKKQLISSLGSMRNLKKYATDVLGTLYEVKDNKLKLEFD

SEQ ID NO: 64 - protein, 1423 aa, synthetic construct
MYNKVLCGLDIGTNSVGWCLTDENNKIIRKKGKALWGVRLFDEASDCAKRRQYRSTRRRLNRRRERIDLLRELMAEEIHRVDPTFFMRLDNSFFQKDDREEDFDYTLFNDRNYTDSDYYREYPTIYHLRKHLLESRSKEDIRMIYLALHHMMKYRGNFLSNAKEFEPMNPNDADEYFEELKQSLANTRDGVTIEYDTTKDFSRLKEVFTSEHGITVLKEKLGKILNPNNDAYIKKIVILLIAGGTIGIKDLKFDQTEDLDFKNLCVKDEKFDQYIATLLSTNEEREEEINALASCKKIYEFFLLGKLLGDQCYLSDAMVKRYQMHQEQLRELKAYVKKNHKDKYARIFRKPMRNKSKANGVEKENKKEELNNYAMYIGSNLTGNHKNRTAHCTAEAFYAFLKKELGLTKVKSTQKTKETYESQILDLMSNGEFLPRLNSTDNGVFPYQLNLMEMKEILNRQSEFYPFLLTKDEDGITVKDQILSVLEYKIPYFVGPLIPKEEGNERSKYAWIKRTDEKIRPWNFKKVVDLDETAKNFIYKMLNKCTYLPSCYCLPKDSLLFSYFNVLQILNKTSINGASMPKDFKECIIENLFRKRRKVTKKQLVEFIRAESGDNQAQITTSTGKEMEEINASLASYYDFKDIFGEEYVCSHIEEIEDMIRDIVIFEDKSILEKRLKQVYRIQDKTAIRKIKGLNYSKFSNLSKELLTDLKFYDESSERNCSVLQLLEETNQNLQEILYDETYGFQKKIEEYNKNHSGTGEFETIEEYVKELGAVSPGMKRPLIQAYKICDELEKIIGQPIDEYYVECTRTNRAEKKRTSSRYKKMQELYEEAIKTAGDDYEFKSAYEKFKSADPNQFQSDKYYLYFSQMGKCMYSGEAIDIGELYDTNKYDIDHILPQSMIKDDSLSNRVLVKQSLNRTDKRDQYPIPQSMLFNGNYREAYRFYQSLKEKKLISEEKYHRLIRKEALSEKELSSFVNRQLVSTNQAVKGFINAIRYFKTTESFTPKIIFSKSENVSDFRKKHDLVKCRSANNFHHAHDAYLNIVVGRTIDNYFAPYDPYISHDHRNSVLQEMHANGLTTNPSKIFEQNKEGTKKNITDRDGYVVWDYNQSIQKVKKTIKNRYDILTTQRTYFGNSFFGKMTIMPKGEGNISVKKGWDKQKYGGFKEYSFGSYSLIKVKDQFILEAIPTMLRKRKEEYLRERFGEYEIRLDNLKINTVFEVDKKKFVITGKTGDRYLLMNQKDRIFSSEQMETLRKIDKLFDKLNQKIGPNEEEEEERKKLRECGIKVNDADMVIAPAKNDQAKEMRITQEEAVQIYETFIQLFSKEIYSFSVINKLGCKLEGKKKEFQSLSLFKKVYLIQKINNLLRCNERKTADLRAIGFKEQEGTLTMNQKLSTCRIVFESITGFYRKVVFECKDGVECG

SEQ ID NO: 65 - protein, 1321 aa, synthetic construct
MKNYSIGLDIGTNSVGWAVINEDTYKVLKKGNNKLWGVETFASAEQAKDRRLKRSSRRRYNRRKERIKILQDIFSKEINKVDPNFFKKLEESKLENSKKNIPINGCENKNIKEYYKKYPTIYHLRKHLVNTAEKEDIRLVYLVIHHIIKYRGNFLYESDFNVNNINFINNLKSLFENCLKYNNYLEISDNINEINFDVIDKTMLNDSKNDQSIKLKKELSKIMSKNTINEFVKLLQGDKFDVIKLFSIDLEGELKVTFKDKNFDESLDKLSEHSEYEDLVEFIYNLKDIYDGITLKKLFKNSNITSLSDLMVWKYEKHQKDLILLKEVLKSNQELYDKMFSYNDTSIYRKYVLNKITSEDLKKEILGCLDTINCKEDIRTKIENDLTENNFMPRITTVENGIFPYQLNNSELKAIINNQGKYYPFLLEKWQDGKTLLERLLEFRIPYYVGPLNSKSEFSWLVKQKEDKITPFNFNEVVDIPASAERFITRMIGKCSYLIKEDSMPTNSIYYSKYKVLNELKQIKIGISGKERKLSIELINQIYNELFLKTSGTITDKKLKEYLKTNPNFDMFYNENINITGYSALNAFANNMNSYVDFFGENGIFNGTNFNIDDAEEIIKCVTIFEDKKILKQKLKDKYKSCNLERICNLKYKGWGRLSKKLLMETYGVNKNTGEAHTIMELLKETDMNFQQILFDKDYNFQEIIKDENNTKQVTKINYDLVKDLVTSPANKRAIYQSLKIIDELVKFIGYNPNNIFLEMARENSTKKRTDNRKRQLEKIYDKCKNELNNYGTLSKELERIDNKEITNKVFLYFIQNGKSLYSSEKLDLDLILSKKDNYQIDHIIPRTLTTDNSLDNLALVLHNENQNKSSNFILPEEYRTSEIIKWWNHLKKIGLLTTKKYNNLCRTSFSQEAIEGFINRQLVETRQICINVANIIDTYLNKGKKITNIVYLKSGISSGYRNKYELFKYRGLNDYHHAHDAYLAVVLGLYKKKYFKYPDDFSTIKSINKTLYEEGKFKEAKYGYFLNSLDEEYSKHYNISNSFNLKGFNETIIRTLHQNDIGVTRKTFIKNDGELFNQNPCSKEEAKVPLKKGMDIKYGGYTSLNQGYFVLVNYKKGNKFIGIPLYYTDMISRDKYIRSELKLKENETYTIKKDKIPFDTKIRWKNQCFYIKGYSNGLELANATQISFDSKAYDDYKYLLSYIFNEKDVINDREETKIDELADYVFTKALSYYPIYNKKLSKLQEKYKTLSDSNNKRIFIRELFNITGTSNTGASFKKFDLIDRMQRLSRQNPKDNCYIIYESPTGIYKNEFNIEGDNEL

SEQ ID NO: 66 - protein, 1501 aa, synthetic construct
MSDKKYYLGLDIGTNSVGFCVTDETYNIIKKHKKVTYISEKKEEKNNKPNNKYYGNHLWGARLFDAASSAKDRRTSREARRRFRRRRERILYLQKEFSTERNKVDPYFFDRLNNSAIHIEDRDALLQEHHLLFNEPHFTDVEFFKKYPTIYHLRLARIEHPEQKFDIREVYLALAHMIKYRGNFLFKGTIPESGCDADRILNTFNELDSYLDEKERFCCTNEKASELLKVFQSETRVQDLHDKIQSIFPVEDKHNSFKNQRIYLIAGASRKTDAVFKDSPDIDFDIIDDEIQGVDICLGNADFEEKTLSAISEAIGDNNTKILLSLKKIFARRNIQRIIRGKKSISAAMVAIYNEHNKQLKVLKQLIKRYNPNYYSAFFRHADEIKLSSSQTNNKCSKTYKTYASYIGSTVLKGKRRRFNHDTTTPKELYSTIEYLLPISKIKPNKKGEEQNFKEKRPGDKKELLKIDTLISNDDYLLRQNSSENGVLPYQLNLNERRRIIENQSKYYPFLSNLDSDFSDPKNKCFRIESILKYKIPYYVGPLSPKATHNWVSMNNESHERITPWNFWDIVNQEKTEEAFIDFLKNYCSYLIHEPTLPKQSLVYQRFVLLNEMNTWQRNGIPLSTEDKEYLITNLYLKQRTITKLSTIEKALRIKYKTTDIKITTSGTTKGKGITDDDLHGTLSSWIDFSNEKAFGPELFHSKKIQEIAEITIKDATLFQDKKVKQERLKRFHLSPSQIKYRSNFRYKGWARLSNKLLTGIKISLPNEPYDYSILDLMWKKSLTLEEILKTKEEDNPKNYKYPFLLEIKKENGDDREDIDDILSRLHCSPKMERAIFQTIEIIKELKSTLHIKGFSEYFVETGRFTGEKKRTNSRKIKIENFYKGIEKQLSESDREGFQTLKGQLKEFTNTKLKKKKWYLYFRQLGKSLYTGKPIDFNNFENYDIDHIIPRARVKDDSFTNLVLVEKIRNKDKSNHYPFVNQYVDKEGIEFITFLNKANSKIRPDKKRNRILRTKELSNEEISGFVKSQLTTTDQSVNAVCKILNLIDKKARVVYSRASTVAEFRQLFGLVKSRDANDFHHAQDAYLNIVVGNVYDKEFSDGGVHVIAHKRDYMESLNRSVKYMFHHDERVLNKDTLIWKSKNYIIGKDGEEIEDPNSHGTIDIIRKYFSINDPLITRKMERKPTLLFSQNEIISARNGGAQFPLKQYKPFNSKGFETKYGGYSHLSNPYGMLVKSEGKNKKPIYSIEFVPSVYLGKHYSEIKVKKYLSENKKCKNPEICIKRLRFNTIIEIPCISSTGETGVLRVGLASGKTNGHQMGLINMTEPKIDNKYRCLIKSLSKLAAYDDSLIAESKDKQSSYEKYGMNDIDENPNEKIKRTDLEELFKYITEVLYKKPEFECLPKVSNTLLALETSLEEFKQLSTINQVHCLCSMLKIIQAKSVQQINFKKFADSNSNLTIFENLPKTCGDIVRNNELPSHAKIIQTSATGLTEWVLFEVPEN

SEQ ID NO: 67 - protein, 1385 aa, synthetic construct
MKELNLGLDIGTNSVGWALVDENGEVIKKNGFRFWGVRMFDESKAASERRTNRCSRRRLRRRKQRIELLQNEFRDEINKVDANFFQRINDSFYKIEDKSIQNHYTFFDDFMTDQKYFEKYPTIYHLRKHLIETDEKADIRMLYLAIHHIIKYRGHFLNENETFNPTDINVIATKIDEFNNILDELSNKNEDDVEYFEKINTEKANFYVKLQEIMIAKNSKKEKESDLLTLMDIKKSTLAAQFFVNLLVYGKTSPKKYSLVKEEDYQVKDIDFSSDEYETAVEEAKKTISELSEIFDFVDEVKSIADYYYLLKLLGFNEKTNECNQSISDAMIKVYDTHQKDLKELKLLIKNYLPSKYNECFRLYDEKINNYVGYVGRLSTEGKTIRFKHCSKETFEKYIKGLLDNIKDEKVQDIILDIKKRIDNNEYMPRQNNGQNTSIPMQLNLSELKDILSKQSKYYPFLKESTDGFTTIDRIEKIFTYHLPYYVGPLSNNSKFSWVERTSDSIKPWNYEKVIDIDKTAEKFIQRMQNKCTYLHGINDYCLPKKSLLFSEYTCLQYLNKLKINGSNIDKNTKDKIFNDFFLKDKSPTKKRLKEFISSNFGEECNDLPEITCNMSSWIDFKEIYKEDFDKKKDNEIEEIIRDITLFEDKKILEKRLKEVYKLNDDMVKQIKGFNYKGYGSICRNLLELTYENELTGEVSDSIIDVMRNTNMNLQELILSNNSKYQEAIDKYNSNIDNKNDMQLDFKEYIDENLYVSPIMKRPLVQAYKIIEEIERIFKRPIDKYYIECARTNQAKKEATNSRYNHIKDLYAACSKEELKSNQIDLGNLQKKLEENQNKLQIDVIYLYFTQLGKFMYTLNNIDFDSLNNGDLYDIDHIYPRSLIKDDSISNRVLVDKNINQNKKNNLFLCQTDIVKEKQRKFYKLLVDNKLITKEKYRRLTETNVSENTLDGFVNRQLVATNQAVKGLIQVLKTFKKVKNSDIIYSKAENVSDFRNEHNFLKTRTANNFHHAHDAYLNVVIGRALNSYYEKNYIYNSNDVLKMQNDKKTLNPQRILTFSNITDKNGNYVWGIDEYTKKIEKYLYHKYDIHETTRTHTSNEMFSKTSISKAGEGTVLIKSNDKKLTIEKYGGIKSYSYCFYCIVKAVDKKNNNLYCLEAIPTPYKNNIDAYISKKCSNKYISYEIIKKQIPTNVVVKQQNLKYVITGKTKDSYLIKNVNDRFFSKKAIFTIRKIDKYFEKSKFTNLEEKNNEIEIAPSKKMKNNKMSNPIIITKLECIELIEEIKKLYSKDIYSYSQIVRLCATLQNTNFNENFNLKDLMSIIYQILLLLKTNERNSADLTMIGLKKSFGILTISRLVPKMRFVSESITGYFEELIFEVPECHLEM

SEQ ID NO: 68 - protein, 1368 aa, synthetic construct
MNLRSLSTSDKQYYIGLDIGTNSVGWAAVDEDGDLLKFKGKNTWGSRLFDSASTAEKTRSHRTLRRRYNRRLQRILDLRAFLYPDVEKVDPDFFNRMGQSSLFADDRQFEEQYVLFNGVDFNEKDYFARYPTIYHLREELVNNPEKADIRLVYLALHHIMKYRGNFLVSGEVSARNVDAEKIVDEFLNELSSLAERYDIALDVESIDAKEINDIVSLSKETRQERQHKLKKVLGFPKEADKLATALSKAVFGYKADFSKIFEVGEETESSFSLGQEDKVEIFEKSALLEDDFGLFRALQGLYRSYLLGGIIKEAPGRTISSSMVALYEKHKEDLARLKDLVKKYLPKEKYRETFKGPKYAGGTYKKAGSKGYTAYLLNNHVQNKTPEETFFSYLGSLFKNVEMDPEDREYWDDALKRMSEGEYLRKLRMSDNGAIPHQLHGEELKLIIENQSQYYPSLAENGEKIEALFSFRLPYYVGPLGSQNNPNRAKPFSWAVRKENAPQEPIKPWNFDQIIDRDATAEAFINNLTGTCTYYLGKSVIPKYSLLYSEFCVRQELNVCKAAIDGEKFNRFDVKTANEIFEGVFKRKKKVSIKDVSDFLKTELGMFNVTVTGTQDEKGFASSLTSYNDFRRILGREIETASDCEMVEKLITWVTVFEDKKILRRKITQTYGPEATGELTNEQIKAVTKLRYTGWSRLSREFLEDLRVDYEGTYVSIMDILRDSRNSRRPMNLMEILADERFHFQNLLDEANKEFLDAAYGTALDSIPGSPALKRGINQSLKIVQEIVQIAGKSPAKICVEMAKEDVGKTKGKRTRTRQRHIEECINANVDQIVKGIKDSEELKKELRENADRLDETKLYLYFLQGGKCLYSGDPLEIDELENYDIDHIIPRSLVKDNSIDNLALVTSECNRTEKRDVYPLPEAIRRRRLGVWRAMRRVGMLSEKKYERLTCANVSDKRFQHFINRQLVETRQISKQVVALLQSQYPDSKVEGIKAGLTSSLRKTYGFHKSRLVNDFHHAHDAYFACQVSRFISCRFPTMGEGLTYAAFTRYDAIMAKERYSKVGLVASQFGRDGFDRNTGEIIKDTWDAQFELERIRKCLNYKDCFISRKTEVLSGEFWKQTILSPRMKTEKAIPLKKDLDPVKYGYYKSPNSAFYTLIKCSKTLRKKDRTVVELVGIPINVANRINSTEDLQKYLETRYNKPFIIRERIPKYQLIEWDGHRYYLTSQSEMINAWQLWLPEQYIGSLEEIEPPRNEGKVLPEETTRAIWALLIKAVEKNPRYKDNLAIKLKSDSIRRKFEEASPKEKQKNVLQLIALLHCNADRGISLVSTSAGRMNSVSFESNYKHIQFVDTSVTGMYERRTNIEL

SEQ ID NO: 69 - protein, 1361 aa, synthetic construct
MKGIIMNAKRSEYYIGLDIGTNSVGWAVANPDYTIPKFHGHKMWGSRLFDEAMTAEERRVHRTNRRRLNRRRDRLNILQDLFKDEIAQVDNTFFLRLKESKFYLEDKDEAIKDKNILFSDLKFTDKDFYKKYKTIYHLRNHLMNESPDDIRELYLAIHHILKYRGHFLLSGDLGISNESIADSLESIFVNLDILQPGEEFDLNLIDSILKNRDKTKSDRRKAVKKVAEEHWESNKKEQSVKNKIAQIDNIAGLALGLKADLSKLLNVPEYTDLEKAYKEICFSKGDYEEKRGDYELSIGEYIKIIDQIKTVYDSIILSSVLKDYATISEAKIADYEAHQDDLQHLKKLLKPTPSLYNAMFRDDSNKSLNNYVAYIGAYTNGKRTSTEDFYKFVKKSLAELEDSVEKERVLNRIGLEQFMPLMRSKNNASIPYQIHKVELIQILEKAASKFPFLNDVKDGLSVKEKIIELFEFRIPYYVGPLNNSNSNNAWVVRKSTGKVYPWNFNEKIDEKASAEAFINNLTNKCTYLIGEDVLPKNSILYSKFSLLNELNNIRIDGQPLPVQVKQDYIDTIFKKEHKKQTKSRILDFLKISGLIPNSIPVSVVTGLDDSIKSDLKSYRDMEKILGEGFDISVAENIIRWVTLFGEAKRILVDKIRENYPQITDEQIKKIKKLKYSDWGKLSNKFLLKIKCITPEGDENSIIDTLENTNLNLMQILAIKSCQKNIELWNQEHTENKEYKTEYDLLDDLYISPAVKRSVWQSLKIVDELVRINGSIPKKIFVEVTRTNKAEKTKKDARQKRLLDLYQAIGKEGAEWKEQILNYNAGDFRSKKLYLYYTQMGRCMYSNELINIDRLFTNDYDIDHIFPRSVTKDNSWDNLVLVKSVENRKKTDTYPLPIELQNRNKEWWRMLRQYSFISERKYERLVRKEELTVEELSGFIARQLVETSQSTKAVTQLLKKIYPDTEIVFSKAENVSEFRYKNNFVKVRELNDYHHAKDAYLNIVVGNVYHEKFTKDPSNYIRNVYDRFNSINDRRKRLSMNHIFVHKLERHNTTIWDPSISMPIVIKMMESNDVRVTRKLTIQKGVLYNASITKANKAKFDSNFPLKRGDQRLLDVSKYGGYENIYNAYYSVFRFIDTKLKKESVNLIAIPIYVLNSLNSNDDYILYAKSTISNRNNYDQIELLYKKLPINSLVRINGFDYYIGGKTNNNVCIDSAISVVLNSSDLLYLKSIIRVVNSDIPEHVFKMDDSLSKDANLRFYRSLVSKMKQSIFIKKSKNKFRELEQDSCICKFITLTEIEQCYVLLDLLNMLTNKKTTYDKLNKCLGVSMSRSTQGMNLSNLNEFTIKEQSVTGLYCKDVKLI

SEQ ID NO: 70 - protein, 1347 aa, synthetic construct
MEDWYLGLDMGTNSVGWAVTDEAYCLLRKKGKDLWGVRLFLEAETAQGRRSNRVSRRRRRRETVRIGYLKELFSEAISQVDAGFYQRLEDSKFFQEDKREHQPFALFADTAYTDRDYFKEYPTIYHLRRELLYSKEPHDVRLVYLAVLNMFKHRGHFLNATLSDGNGGNIKELYGQLQEGFSELYDKEMAAIRDAEELQKLLTDKKYTKSGRAEEVRKYLNIDKKDKAQCEMWKLVCGLQATLPVIFEGEEFSEENLKYKLSFDDGKYEEKAAEVEGMLSEDAFELFLLLKQIHDGVILSDIMESYHYLSEARVASYEKHKEDLKRLKKIYRLYAPEEYDSMFRTMEDNNYSAYAGSFLTGGEKQRRGGKHKTEEFYARLKKKIVTFPETGDSRYVLDEIEKGTFLPKQLTASNGVIPNQVHLAELKKILENAENYLEFLKTKDEGGLTVSEKIIQLFSFQMPYYIGPLIQTENNHAWVKRKEMGKVYPWNLEQKIDVKETAEAFIYNLVNHCTYLSDERVLPKNSLLYEKFMVLNELNNLRINGEKISVELKQELYQALFKNGKKVTGKRIKTYLLNRGYVSKEMPVELTGIDGDCVNRLANYKKFLEIFEVDTLTYAQEQMAEQIIYWSTVYGDSRKFLGDKIEEEYGKVLTPEQKKRILGYKFKDWGRFSREFLFLEGADKETGEIDTIISRLWNENYNLMQLLGDELFTYKEEIEKRVQKIDKTLFEIEYEDLQELYISAPVRRMTWQTILLLRELCSVMGSYPNKVFVEMAREHQEDKKRTVSRKRKFEELYKKCKGEEREWLAEISGTEESRFRSKKLYLYYTQKGRCMYTGEQIELSNLFNDNLYDIDHIYPRHFVKDDNIDNNLVLVKKESNAHKRDVFPLEPGIREKQNDLWKMLLEGGFITKEKYFRLTRNDPFTPEEQAGFISRQIVETRQGTKAIADLLQKGCPDSDVIYVKAGNVSDFRHEFNLIKCRNVNDFHHAQDAYLNIVVGNVYDTKFTKSPRRFIEAYRKDPEHNKYHMDKLFDFDVKRGNVVAWEVGKSIGEVKKTFRKNSPLVTYMNYEAHGGLADQTLYSAKAAKLAGGEGYIPLKASDERLKDTTKYGGFKKYTGCYFFVVEYTVKGKRIRSIENMPLYLKKELNSREKLEQYCMEVLKYAEPEIICERIKMYSLMKINGYYAYLSGRTGNQLILVNAVQLVLSYDWMLYVKRINDAVERGYSEEQLEYQGEITREQNLKLYRELTGKHMGTIYGKRPNGIGKFLVENEEKFEMLSIQQQLSALLEILKVSQRTSGGVDMTMLGGAKKAGVSLISKKISDLKECKVIHQSVAGLYVSETDLLSL

SEQ ID NO: 71 - protein, 1315 aa, synthetic construct
MSEYYIGLDVGTNSVGWAATDTAYSLLKYRGNAMWGVRLFDDANDASERRSSRTARRLHARSKQRLALLELLFSEALAEKDPLFLTRLAESALQEQDRSSASCRYALFNDPDFTDREYFKRYPTAYHLRSELIHSTAPHDIRLVYLALHHIVKSRGHFLFDMDTDGEYKGVREIFDELCVLLEEQYDTACPVSDTDAFLELLQNDSMGITDKKKALKPLVGKNAADMVDGYVLCCALVGATVKCADLFCDETLKDVDIPSLRLRDDLDENYDRFADALSDRMDLVVAMKAVFDAALLSKILGKAAHTGDETAYISDAKVQQFDENRADLALLKRYVRSACPEKYGYIFRKKKDKLNNFAAYGKRSIASGEYTCKQEDFCKFLKKELPAPSEAAYAALFAKIENGTLLPKLRGADNSVIPHQLHYRELKKILENAAGYLPFLQQADADGLTVTDKILSIFSFRIPYYVGPLNLKSPNAWVVRTEEKITPWNFEKVVDTQKSAESFMIRLIGKCTYTGEAVLPKDSLLYSEFAVLNEINLLCLNGTPLPADIKNRLFQDLFVQSNARVTKKKIKQWLLMHGLAKETDEVSGVDNIIKANLKSYHDFKNILCKVPHAEIVEDIIKHILIFGEDKKMLRRWLKASCPFLDEQDTAYVLRLRYKDWGRLSRTFLTEIYTPDENGEALSVMDMLRATNKNLQQLLTDDYDFAKQAEEYRSLKFGVGGSLDEQLQDLYISPRIHRSIRQTLKIVKEITAAEKCAPKKIFLEVARGTKEDLKGKRTVSRKDNLLQLYKACKEEHGELAAALAAEDEGRLRSDALYLYYTQFGKCMYSGESIDITKLKSDYDIDHIFPQSRVKDDSLDNRVLVKRELNNDKKNIYPISADIRTNMQPFWHMLKEKGLISPRKYERLVRNTPLTEAELSAFVSRQLVENRQSTKALATVLKRYYPDTRLVYSKAMNVSDFRHEQELVKCRDINDLHHAKDAYLNIVVGNVYDTKFTAAFFKNILTEEYSLNKVFERDVRGAWQKERDLAKVRSVMKKNNILVTRMPHEKKGKLFDLQILPKGKGQLPVKVDRSIENYGGYNNVSGAHSIVVEHDGKKGRVRTIEPVYIYQKALYEQDPLRYCREILGLSEPKIVADRILFDTLLELNGKRIYITGRSGNYLCGKHPYQLAIDSDSEKAIKDIKKYVDRCAEKKAVLPITEHDGISAETNLRLFDLFIAKFHAPVYAAYFTNLCNFCEQHREDFIALTPDAQCHLLLEILKAFKCDRTASDLSVLGGPKNAGILMMSKTISTCRTAYVIHHSPSGLYETKVDLLRP

SEQ ID NO: 72-80 - skipped (9 entries)

SEQ ID NO: 81 - protein, 1077 aa, synthetic construct
MAPKKKRKVGLILGLDLGVSSVGFGIIEEDTYNIVDYGVRLFDEADANNNLKRRTMRGARRLKSRKRNRIQALKYYLCQIGLVNTIDFEKLNNVYELRVKGLNEKLSSLELVNVLVNIAKHRGVAYDIAIDEKDKEAEALSSALSLNTKSLSNQQKYVCEIQFDKLKNGEKLRTTNNLYKSCDYEKELRKILSNQDLKPEDIEKIVDIIFRKREFSEGPGSEKFPTPYGSYRWIDNVLQHVNLIEVMRGKCSIFPEESRIAKCCYQACLFNLLNDLNNLTILKNGEKVKLTKEEKQNVIDVINEKGHITPKQLMKKLGVDEEHISGFRVDKNNKPLLTTFDIYEKMLKLELNSDFINDKNEIDQVIEVLTKTIVVGKRMEELSNLDIKLSKEEIEKLSTLTKVNGYHSLSKKAMDILIPELLSSNFNQMELIHNNNLFQNKLDFSTKNIPFDDSSILSPVAVRVHKQTLLIVNKLREEYGEFAAIVIETTRAKNSQEEKREEIEKQKKFEDAKTITNEFLFKKGLNPEKVNTNTKLKLRLYNEQNGKTIYSGETIDLDLLLNDDKAYEIEHIIPFSISFDNSLNNKALASHQENQDKGNHSPWGYFSSGKVEGPNDSWEKYVAFVNVLNLNPKKKENLLRQEDITKYENRKSFINRNLNDTSYGIRTVMNTLKSYFKANQISTNVFTIKGKITSAFRGRVGLKKDRDEYIHHAIDALIIASFKNQKTFYEAFELGTTEQGDLYHLQTGELFDLENPLEDSKLLKFISNLKNIHGIPNDFSYKVDTKTNRQFSDETIYSTRKYEDGEYVIKKYKDIYGKDDGEKVKKLFEKNEATKLLVYRNDKQTFELLEKIVNAYSNEKNPFAKYKEEHGYIRKYSKKGDGPIIKQLKYVDGKLGNYLDITQKYPKTNDKKVVLLQNTPYRTDFYISKEGFYKFLTIRRFHIKQIDGLNVIDYDLYQSLKENKKITLDDEYLFTLNRNNIIHIVGEKDEYFKFIATNNDIKNIIEVKRIERLTEKQMMVSIGKKVKKIEKYNVSPIGKYQKVVKETLKLVWKKRPAATKKAGQAKKKKDYKDDDDK

SEQ ID NO: 82 - protein, 1141 aa, synthetic construct
MAPKKKRKVSKLAMGIDIGITSVGYGVIDLDDGKFIDYGVRLFKEGTAEDNEKRRNARGRRRLTSRRHTRLRDMNKALEQFQIKGSDYHPLSNVYELRCKGLKEKLTCDELTAVILHITKHRGSTLDVVEENEAKNADILSTKEILRKNDEEIKQGKFICEIQMERLLMNHSVRGHANNFTTKDYVSELQEILKHQDLSAEAIDAIITIVQRRRAYYEGPGSEKSPTPYGRFIEENGGVVQIDLIEKMRGKCSVFPDLARAPKMSISAELFNFLNDLNNLVVNGEKLSVEAKHQIFSIVNKKGKITLKQLAKCLQVEESDIKGYRIDKKDKAQFTEFKGYKKLKQLCQEDGLAVSLQDYEMLDEIIEILTKKKGIEERKEALKGSVFGMSDYLVDILAEATGITGYHALSLKALRMLNKEMFYSEFNQMQLLHQLNLLNQNRISYKGQRNITANADAILSPVVKRAQNEAFKVINQLRKKYGEFDTIVIEMARDKNSNEQKKRINDMQKRREKSREEMDKMLKDLGYDLDKINSKIRMKLSLYEQQEGKSAYTFQPIDLKRLITDPKYTEIDHIIPISISLDDSQNNKVLALQSENQMKSYLTPFMAFQANKFADMTYPEYKARVLSNPKYSYKKKMNLLNESDITKMDVKKDFINRNLVDTRYACRVVLNTLKDYFKDNEIHTKVHTINGQLTHLFRRKSHLDKDREENFLHHAIDALIVVSIKKLQLVNNYLFLSDMENQGNGGNETTSSIPSDEQFYEEHYLRYISDLRTLYQQSSQYYNRLISLSDMMYAPIKISHKIDTKANRQFADETIYSTRNRDGIDYVVEKIPDIYDPKSKKCKALVESILNHDDQKYLMARNDPQTFAILKEIVQNHYVMYKQDETWYGVKNGKIELKGENPLAGYKKEHGFIKKYAKRGNGPAIVSMKYESEKLGVHLLISRNYDLKDNKKVVLRQISPYRTDFYHCDDGKFRFVTVRYANVKYDKKEKKYVISKQWYEDEMQKKNIKSTDEFLFSLHRDELIGIIRKQGDSYYYDASTEGKGDKQYSDGIHPEILKFTGTNNDAKGVIEVKPIYAYCKKQLMPSIQSVVGLKKFSTDALGNLYEVKKNTLKLEFDKRPAATKKAGQAKKKKDYKDDDDK

SEQ ID NO: 83 - protein, 1183 aa, synthetic construct
MAPKKKRKVDKKIKVNIGLDIGITSVGWSILDEDNNILKLGVRLFDDVANEKDGKLDNVQRRECRTQRRRIRRARTRKQAYLNYLVSQNWFNSYDEAVEFITNFDLIKFGYDNPIELRIQALENKISKDELIFLLFHYLHHRGYLYITESDADKLNENDENKKEFPSLKIYKFYKNYEYYKGSIVSDNSAYDFANEIRQILNIQGIDENFANYYINELFLKHRDYSQGPGSEKSPTPYGMWYWDDKEQKVTKREGDSLWDSLVGKCSYYPDEKRGLAKSPIAEIFNLLNDISNIYFINNSNIKLTEDERNKIFSQYNNSLLKTKSFNLTPKELLKILQLKCQDQNIDESDIYGYRVDGDNKKIITELKNYCQIIRWAKEYLVNKDEINLFNLEILNFANNIFVELSKTQDLKKRLEILKNIKSKLLNENKFTNIDSDKSYNLDIKLIKGLKGLTKTHTLSYKAMEEFIKFSLSNGSENLNWMRYSNFNKNLNNTNQKKSSKYLKKIDREEVISPTTRRAFNQTINVLNKILKLYSNEYEIKNITVEVARDKNSCEERKVITSSQNKNRKEVEEILKNIGNKKFEDLNAAQILRIKLWNRQRQFDIYDSKLGENESKISFDDVINGNKLDIDHIIPYSISQDDSINNKVLTRRENNQVDKKQQTPYQFFSQLGKWDDYKEKIEKFFSDKLKEKWIKNLLYIGNPLTDIDSFVGRNLSDTRYASRLVLNVLQEFFKNNKNYGNTKIKVIRGGITNFARYNLFTNGAGKSLIPKNRDIYCHHAIDASIVSYLGSNHNIKLLLNHAQQEYNDLKKKNNFEIDEDKRLVNKETGEVIESWYAKNGESRLFAEQLKQYNTIYNKSEGCLIPGSKSNEIKFSRMYINKNNVQLSNETIYSFRFKKDENGNQLDDGIIIDYIKVLESKTSDLEKYFIDEKIQEKDLEKLLCYKKNPKLYNKLKMIFNRYYKSGDNTNPFIRYMEEECKIEKPKWIQVGNLRINKLRLIGETKNSNSVIILNKHNKKAIYKSLKFLFLRIYKDNNDKYRLIGINQKVLTYDKKKSQLKIDKNKLDKVLELNNIFNSEKYIDIKRGMIFVRKEDNKLFWSIGGGTLSQNKLELKSINTSNEISNLGKQFQRSLSTIVAEYDIAQVDELGNIYNRRKIELKRPAATKKAGQAKKKKDYKDDDDK

SEQ ID NO: 84 - protein, 1297 aa, synthetic construct
MAPKKKRKVDIGTKSLGWSIIGKNKENNEWDIIDFGVRIWDAPEVSKTLDTSAKVRREARSSKRMFRRRRARIKDLKDYLVNELNLISYKEINDHFDKLKEKNDYSVTNKKYRNDINPLFLRYRAIKNEEKLTSLQLIIVLLSFAKRRGYENKFSFEEDKGGYGSSSKKFIGKTEEGNKKYQFPILAIMEDDFFKSNNIGKEQEYFYRNRKNNKINKSDKNKEVEREQILFLTKDNKEELRKILAIQQKFYLELTNERVDFILDEIIFRKRDFEDGPGPKQENLKESWKNSLNKINYYKPFIENVGKCRFVEGEYRTNPFSILGDLFLIQNYLGQVFPKNVLKVKKIDNITLKKIAKEIINEYLNNFVLDEKIFTKILKNNNLIYSEFDNFKKMEKNNPLEQLFLASLAKIKQPFAFKETLKEYLSSINLNELSFDAFENNPINKLGKVLYENKTPSRIVNKIKELEIKNLNPDEVEIWIKKFNDQLKKVKNRTFSVSSKHIFNALEKLLQEGIIISEYQAELEKKQKQEAINKIENNNSNNFLSLPKDQDMKKNAVVFRSINQTRRVLKQIFKTYGPIETVVLETAGDLYNEISVRKRISNQQESLVKEKEERSRRLKALGVNVTGANDLKLRLFDSQKDLKEISKKNVRSIDPYSLYKDNIEYINERDIFTSKYEVDHIIPYSKSNDDSLANKVLVSRTNNQLKGNRTPYQWITNSFGEKAFDNFKKNIKTYYFKGNKNLGKFARRNENLLKKNFSRESYLENETAKINDTRYITSYIANYLELEMEKYKRINGLNYTPEIITLNGNVTSYMRRVWLSNDNWGNFLKPRNITPFHHAIDAIILANLFDKYQAFYSNLILRIEKFYWDQFNFVKKHDIDFETTKSFFENYQNIIEYQIKFATRYFKTEEVEEETIKAAKIAKQNKMIEEVKLLFEYLLINIQEKNVLDFKTDPNINYLFAPIVSNLDEKVENLIPIKISIKEEVIKEDIKQTNIEANMMDIPQDEVDNKRLSNTDKNELRRKNIILEEIVSPQDWAQKNNREIKDFPYISYKENYKRSGNFAKANPIKKEVVLGKMIDFLIQEEKAHQKEVKTIGMVDAKREIANSKARIVDLQEQLKTKNYLSLTKENIDRQGIYVFSGENYYETSEYLGLRFNEETHKFEKYNLFNAIKNGKNKQNKNELLIVRNTTFKLKDEDWFYNYKGFSGVGFAKSPNLLYYSSVPTLRITFKESDKVSEHSPIIYSISSLINKIEGIVEINTLGKYQGIRKLTNLKRPAATKKAGQAKKKKDYKDDDDK

SEQ ID NO: 85 - protein, 1369 aa, synthetic construct
MAPKKKRKVKDYFMGLDMGTGSLGWAVTDSSYCLCRAHGKDLWGIKLFESANTAEERRVFRCGRRRLDRRNRRIQLLQQIFAEEMAKVDPGFFLRLKESRYVPEDKRDLNGQTPELPYALFVDQSYTDKDFHRDYPTIYHLRKELMESCEAKDIRLVYLALHHIIKHRGHFLFSGIEADKITDFYGTFTKFIQVLKEQELEFNLEPDRDQCVQAKEILENPQLTKTAKASGLIQKLQAKTDCEKAVMRLLAGCKVKLSGIFEDKAYDETEKPQISFSEAGYDEYEEILEGVLNDQFIVIAAAKAIYDWSMLVHILGDARTISEAKVKVYEKHRRDLKILKDMVRNHLSREDYKEIFAVTDEKKNNYCAYIGMTKSNNKKVPLAGKECSREEFYAFLKKEVVDRIEDKSVTEMLSQEIELGTFLPKQVCKENGVIPYQLQEVELLKIVKNAGEYLPFLKENGDKIQNILTFRIPYYVGPLNVVKEADHSFAWAKRKSGEPVYPWNFEEVIDVEASAEIFIRRMTNKCTYLPSEDVLPRESLLYSKFMVLNELNNLRVNGEKISVELKQDLYENLFKRYRKVTVKKLKNYLIQEGIVEKGVDLSGIDGDFKASLKSYHDLKEKLTGLPLSETEQEQLILNVTLFGDDKALLKRRIKKMFSSLTEGQVKGICALSYKGWGRLSRKFLEEVISPVPETGEIKNIIGALWETNDNLMRLLSNRYGFLDAIDELNSDGQKSELTYKTVEQLYVSPAVKRQIWQTLKVVKEIKKEMGGDPRRVFLEVAREKQDSGRTMSRKKTLQELYRKCQEEEHDWLGEIGNWDEHTLKSDRLYLYYTQKGRCMYCGKRIDIQNLWDKNTYDIDHIFPQSKVMDDSLRNRVLTCRTCNANKTDHYPLHGDIRQNMKPFWSNLKNTGLIDEEKYKRLIRADEFSPSELAGFIERQLVETRQSTKAVADILKKAMPDTEIVYVKAKTVSAFRQQFELIKVRELNDYHHGKDAYLNIVVGNTYFVKFTKNASWFIEQNPGRSYNLKRMFEFDVESKGETAWKAGSKGTINIVRKMMEKNSLLFTRRSFEVQGGLFDQQLMKKGKGQVPIKSSDKRLLSIEKYGGYNKATGAYFVVVESEGKKGMMKRTIECVPLYRKKELDNSEEKLLEYLEEEMQLKNPRILLKKIKTDTLFNIDGFRMHLSGRTGKQLLFKGANQLLVNSEQEKVLKKVVKITEQIKQNKSYKINTYDGVTDENLNDLYQLFMKKIENPPYNVRLSSQNPVLAKGKDKFEHATQENKCQILYEILHLFQCNSGAADLTGIGGAKKAGILVLAKDITKCGQISIIYQSPAGIREREIDLKRLKRPAATKKAGQAKKKKDYKDDDDK

SEQ ID NO: 86 - protein, 1370 aa, synthetic construct
MAPKKKRKVRDYFVGLDMGTGSTGWAVTNEEYEILRAHGKALWGVRLFESANTAEERRVFRTARRRLARRNWRIEILQEIFAEEIHKADDGFYLRMKESRYVPEDKRDSLGKCPSLPYALFVDSDYTDKDYHGQFPTIYHLRKYLMETRETPDIRLVYLALHHMMKHRGHFLFSGNIESIKKFESTFGQFLDRLEEEELEFHLIAEARENFGGIEAILKDSALTRSAKKTRLVKLLGAGTSCEKAVLSLIVGGTAKLSDIFGDDELNQCERPKICFADSAYEDYADSVAGELGERFLVIEQAKTIYDWAVLADILGEYDSLSEAKVAVYEKHKKDLDCLKTFVRENLGPDVYRRVFVISDEKLDNYGAYIGMTKNNGKKCDLAGKKCDRDAFYAFLRKEVLNNAPDGETAEYIKQELDKGTFLPKQVTKENGVLPYQVHLFELKQIINNLKDRILLLRENEEKILKTFTFRIPYYVGPLNGVRRGGDTTNWVKRRTDDKIYPWNFSEVVNEEESAERFIRRMTNKCTYLIHEDVLPRYSMLYSKYTVLNELNNLRLNGEPIDVRLKQNIYNDVFMRYRKVTQKKLRDYLVREGIADKNVDITGIDGDFKGTLTAYHDFKEKLTGVDLSQEEKENIILNITLFGDDKKLLLRRLKAMYPKLSDGQQKALCGLSYNGWGRLSEAFLERVTAPAPQTGEVWNIMRALWETNDNLMQVLSEKYRFAEAIEEENGADELQEISYQTLEQLGLSPAVRRQIWQTLKIVREICKVQGGPPKRIFVEMAREKSESKRTESRKSRLMDLYKSCKEEEREWLEELSHIDEHSLRSDKLYLYYTQKGRCMYSGEPIALSELWDNRKYDIDHIYPQSKVMDDSLDNRVLVKKTYNANKTDRYPIDADIRNKMKPVWKSLLDGKFISKEKYNRLTRGTGFEPSELAGFIERQLVETRQGTKAAASILKQAFPDTEVVYVKAKVVSQFRQEFGLIKVREMNDYHHAKDAYLNIVVGNVYYTKFTKNAAWYVRQNPGRSYNLKRMFTSEDVVRNGEVAWKAGESGTVGVVKRTMGKNHILVTRRAYQVKGGLFDQQLMKKGKGQVPVKSSDERLLSIEKYGGYNKAAGTYFMLVESEDKKGNAIRTIEYVPLYLHKQIEAGEDQALRYLTKERALKNPQILIPRIKIDTLFKVDGFYMWLSGRTGKQLLFKGANQLVLSARDAKTLKKIVKYVQRRKENPKLTIGNQDEIHTEDLLCLYDAFLDKIKYTVYHSRLSAQEKTLTEKREVFLELNKEEQCLVLFEILHMFQCQSGSANLKLIGGPGNAGILLLNSNITKCNQISIINQSPTGIYETEIDLKKLKRPAATKKAGQAKKKKDYKDDDDK

SEQ ID NO: 87 - protein, 1376 aa, synthetic construct
MAPKKKRKVSRKYSIGLDIGVASVGWACMTSDFRIPKYNERYAIGVREFEAADTAEERRIQRGTRRRYNRRIKRIQLLQQSLEALLQQHPNFLMKTEATEKHFWRNNNQFENRSLSEVLADLGENTRKYPTIFHLRQALLSENKPFDSRLIYIVLHNLVKYRGHFLNENMEWNNSSNNETTIDLTKEYFSILTNLGYETDDLLDSNHETTLHDIIQILKSNDYTNNDKRNSIKKLIGKEFHDPITLIVGLKSDMHKLFPNSEGAAIYQSEKLKMSFADEDITEVYEKLTDEEKLVIDQANKVYQHILLNDLLDGHNSVAAAKVTSYNQFSEDLKLLKDVFNKYLGEKAYRDMFITTRKKWTQYQQTRKNNLLCTFDQFLKIHATEDKFYRDLKKTIENIIKKEQNAELQAVLDKLNNNQFLQKQKSYLNAAIPHQNNVYEAETILKNQQQFHPEITDNVIEKVREIISFRIPYYIGPLVKKATDDDFGWAIRKDEQQHVLPWTIDEVIDRSNSAEQFINRMTSYCAYLTNEKVLPKHSLTYELFEVLNELNGIQIRRENDLPDKDFRLSEEEKLWIINNVFKKYKNVTHTILLRELRNSDHKELVLDTDTDNLKQVYGTQKENKFGSSLSSYITLSEIFNNIEEVDNDMLEELIYWITVFEDKEIIKLKIKEKYKDINDKQINRLINLPFAGWGRLSNKLINELPADKNSGETILDIMTKDALVFMEILSIEKYNLNERITTLNLKNNESYTKIKYKDIAELQGSPALKKGIWQAILIIEELVEIFGEPEHIMIEFAREDGPNIRTKSRQKHLADLQKAISKDEKELKAFLKEHSHYEEQKYKNDRLFLYITQEGKCLYTGEPLVISRLQDYEVDHILPRSFVKDDSIDNLALVTYTANQDKGDTKMPLETMNEEEKFQQKQHWKKLFDNKLISQSKYFKLMKESFSDQDKESFFARQLVETRQITKHVKDLLNDRFEHTEIHPVNANIVTNLRKHADVVKIRDLNNKHHAIDAALAVLVVQFIVKQYGHNFLNFNFKFQEARKKWRDMLTKYNKNFFLFSDIDKYDKFTHYSTGEILSGREFMSTLNSEIPWQTTKKIGSSESAFYKQTLHSPQVKTAKYSSDKTVHGVYDEMKNDSTYLISYKELNKKGKEIIKNDFVDLYVIEKYQLKEKGQKDLALFLASKTAKGEVVDATIHTKIEKFQMVSYEGHEFYYISSGEMHNAKQLLLPNKVIDTINKVRSNPNENNDPTMLANTFKNIANEVIKQYSEFLPDSRIDLLKNYHSEIVDAESFNHGITELFKTTSASAARSQLFGARYVKKPKPEQLLFNHSSITGLRYRKPKSYKQDLWSQKRPAATKKAGQAKKKKDYKDDDDK

SEQ ID NO: 88 - protein, 1381 aa, synthetic construct
MAPKKKRKVKNKMKVSSGGQEYYLGLDMGTSSVGWAVTDMNYRLIKKHGKMLWGIRLFESANTAEARRVFRGARRRIQRQKKRIELLQEIFSGEITKEDPGFYLRMKESKYYPEDKRDQSGATPVLPYALFVDSHFTDKEYHERYPTIYHLRYELMYGQGRKFDVRLVYLALHHIIKHRGHFLFEGKEMSVIQDFVPAFDLFLSYALENGIEISVGENQKQEIQKIMADRKLGRTAKKQAMGKVFGTDRQKKALAALLAGSSVKLADIFGDPSLDEGEQKKISFADSSFDDHINEVEDILQERFPLIATAKAVYDWAVLTDILKDSCCISEAKKKIYDKHREDLRRLKELLRNQSVLFQQVFGVPKKKEANYSAYIGMVKKNGKKIEIEKKCSKQEFYDFLKKVLKPLEGTEDILQEIEMGIFMPKQVVRENGVIPYQLHQYELNQILERAKEYLPFLSETDAEGYSNIDKIKKLFQFKIPYYVGPVNTFHEDQGGNCWAVRQEAGQIYPWNFEKKVDLEKSAEKFIHRMTNKCTYLVGKDVLPKESLLYAKYRVLNELNNLRIDGEIVSVELKQHIYCELFEKKRRVTGKMLKEFLVREGVIHKEQILSGIDQNFKSSLGAYHDLKQILEGTRVSDLDKEDIIKDITLFAESQNMLKKRLKTKFPELTEKQIRCLAEKKYSGWARLSREFLEEMEAVNPKTGKDCNIITALWETNDNLMKLLGHKYFYAEAVEKINEEQMDHSAISYQDVDDLYVSPSVKRPIWQAVQIVNEITRIMHGAPKRIFIEVAREKEKKPSVKNSRRKQLLDLYQSCKKEESGLYAELSQEKDNSLKSDKLFLYYAQLGRCMYSGEAIELEHLYTNRYDIDHIYPQSKVMDDSLDNRVLVKRELNAEKSDSFPVPEQFLQKAGALWRALLQKGLLSKEKYERLTRREEFSDGELAGFIARQIVETRQGTKAAAQLLKIAYPQTEIVYAKASAVSQFRQKFDLIKVRELNDYHHAKDAYLNIVVGNTYHVKFTKDAAWFIENNPGRSYNLNKMFTSERVVRNGETAWIPGNDGSICAIKEALSKNNILFTRRSFEQKGGLFDQQLVKRGKGQIPIKGAGTDSRLMATDKYGAYNKASGAYFMLVESESKKGKRIRSIEYVPVYLAKKLDMDKHSKLVYCEEKLGLKQAHIIIDKIRIDTLLDIEGFKMHVSGRTGSRLLFKGANQLVVSRRFQEVVKKVCKYYNVRNQNRNAVLSEKEELTDEVLLELYEEFQRKLSNTVYKVRLHSQIATLEKGKDRFTGLSKEEKCLVLYEILHLFQCNSIAANLKAIGGPGKGGRLVMSKDISKLNHIYMINQSITGFYEQVIDLKSIKRPAATKKAGQAKKKKDYKDDDDK

SEQ ID NO: 89 - protein, 1383 aa, synthetic construct
MAPKKKRKVGQKDFYLGLDIGTDSVGYAVTDEQYNLLKFSGDAAWGVHLFDEAELSQERRAFRVARRRLDRRKQRVMLLQELFAPAIRAVDADFYKRLQASDLFRDEAGDRFPIFNDVDYTDRDYYKAYPTIHHLICDLMADETAHDVRLVYLACAWLVSNRGHFLSNLDKENISALKNFDKVYSEFEHFFTDNGYAYPWAEADRRTIGEILKKKTTVTAKNKELTLAFTGGGMAPKEASEDFPFGQRAIIKLLAGGTAQLKELFDQEAYAEFGAVSLNFDDDKLEEIAGNLGDDFALITALRQVFDWSVLVEAIGDAASISEAKVETYRQHKADLAILKRIIKNYRPEKYDEVFREIGKANYAAYAYHSNKKADAKFKKVDREAFSKFITGIVKDITPKAEDEEILADMRNRLDLRTFLPKQKNTDNRVIPHQLYQYELHEILKNAEGYLPFLTEKDESGLSVSDKIRSIFAFKIPYFVGPLNEKSDHAWIVRKAGKIYPWNFEDIVDLDASEEGFIRRMTNQCTYLPGEPVLPKDSLLYHKFTVLNEINNLSIHGERISVELKQQIYSDLFLNKKKVTRKRLREYLIVNGVVEKDDTDAITGIDEEIKSNLLPQISFRRLLDEGTLSEEDVEKIIERSTFSDDKTRLKKWLAREYPQLNSKDVDYIRSLRLRDFGRLSQAFLEGIIAADRSTGEAFTIISALWNTQKNLMELLSDQFTFAETIERFREDYYREHPVSLSERMDEMYLSNSVKRSVFRTLDIVKDVKKAFGAPKKIFVEVTRGGSPDQKGKRTKSRSQQLRELYDKCRDEDLPLLKQQLEAMGDAADSKLQSEKLFLYYLQLGKSAYSDKRIPLEALASKAYDIDHIYPQAFVKDDSIINNKVLVLSEENGAKSNNYPIQGSIRHHMQGFWSYLQEVGLMSKEKYKRLTRSTPFTEEERYGFINRQLTSTSQSTKAVATLLKEHLPETEIVYCKARLVTDFRQAFDLFKSRQYNDLHHAVDAYLNIVTGNVYNMRFTKNFNVHSQYSIKTETVFTRPVTYKSQTIWDGIDMLAKVKSIANKNTAHITKYAFMKKGGFFDQLPVRAADGLIPRKKHLPTQKYGGYNKPGVMFFIPVKYQLGKKSELFILPVELLCGKRFLADPEFAQAYAVKRLERILKKPVDQISFPLGMRPWKVNTVLALDGFKYCITGSSNGGTRLILQPMMSFSSAPYWAFYLKKLEVFVEKNANNPQHVYDEAYDKVNCEDNLKLYDLYCQKLTSTIYSKRINSPLDILLQGREKFSGLDIKQQAQALLNIHQVFGRIAGGCDLTLVGGKKGSAATSASSAISNLGKRYQDVRVWDTSPSGLWSKRSPNLLDLLKRPAATKKAGQAKKKKDYKDDDDK

SEQ ID NO: 90 - protein, 1386 aa, synthetic construct
MAPKKKRKVYYGGIDLGTSSVGWAVTDTEYRLIRKKGKDLWGVRLFDEAKSAQERRSNRTARRRRARETARIGLLKSWFAEEIEKVDAGFYQRLEESKYHREDKKTGSRFAVFADREFTDREYYETFPTIFHLRKELLESKAHFDVRLVYLAVLNLFKHRGHFLNEYLEWEEHDKSMADLFQEFSETLPEEPGLQFPQIADGVQMEEILGSRLFSRSEKAEKLAACLGISRNRNKAEYELVKLFCGMSGKPSLIFGQEALSDAWGKKQVSFRSSAWEEEREALGDCLPEGCMDMIEAAKRIHDKGLLAHILKGHTYLSQARVETYEKHKEDLKKLRHVIKRYCRDEYDTYFRTMTDHNYSGYVGTVNSGKEKIRRNRGAKKEAYKAFWKETKRILDRMPPDDQEVSYLKQELEKETLLPKQRTFENGVIPNQLHLAELRKILSNAETYLSFLRKKDESGLTVTERICKLFAFRIPYYVGPLSIGEGGRNWIQRKEGGRVLPWNIEDKIDMAKTREAFILKMVRQCTYMKGKHVLPKNSLLYEAFMVLNELNNVKIRGEKLDVELKQKIYREMFLTGKKVTGKKLLQYLSANGILSPDEQDAITGIDETFHQSLTSYGRFYSILGEQIESREIQNMAEQVIFWGTVYSGDKKMAGELIRETYGERSGKPYLTEAQIRRICGFKWKDWGRLSKDFLELQGCSKKDGVKKSLIRALWETDCNLMELLGDEFTFQDTLAGQIQKQEKLLKEFCYDDLEDSYLSAPVRRMVWQTILIWKELCQVMGEAPARLFVEMPRGEGEKGKRTVSRKKKLEELYKTCKTDSRDWLKELQDLSEDDLRSRKLYLYYTQRGKCMYTGHPISLEDLLSGNRYDIDHIYPRHFLKDDSLENNLVLVEKESNGHKSDTFPIEASVRSKRQGLWKSLKDGGFISPEKYKRLTRSWEFTDEELAGFISRQIVETGQAARYITGLLDRLLPETKIIFVKAGNVSAFRHQTELFKSRVVNDFHHAADAYLNIVVGNVYDTKFTQNPIHFIKAYRRDQKSNAYHMDKLFWYDVVRNGEVAWKAGQTGTIRTVRAMMARNTPLLSKRVYEAHGGIAKQTIYSKKEAKERVYIPVKSSDKRLQDVTKYGGFRSVSGAYYFLVEHEKKGKRVRTLEQMPVYLKARLETDEKAWENYCMETLGLVRPEIRWKKIRMRSLVKRNGYLMNLAGRTENQIYVENAVSLCLSRRWINYIRGLENFKELGKEEDRRENREKRITKEKNELLYQELIVKHRDTIYQKKPNPMCKKLIEKQEAFAGLLLREQVRVLLELLKVTQCQNLNMDAKEIGVKASPDKIGNEVTAQEEFLLIEQSVTGIYSCSIDLKTVKRPAATKKAGQAKKKKDYKDDDDK

SEQ ID NO: 91 - protein, 1387 aa, synthetic construct
MAPKKKRKVYYGGIDLGTSSVGWALTDTNYRLIRKKGKDLWGVRLFDEAKSAQERRSNRTARRRRARETARIGLLKSYFADEIDKVDTGFYQRLEESKYHKEDKKTGNRFAVFADREFTDREYYETFPTVFHLRKELLESDAPFDVRLVYLAVLNLFKHRGHFLNEYLEWEEHDKNMADLFREFYETLPEESELHFPQTADWTLTEEILGSRLFTRSEKAEKLAACLGIVRNQNKAEYEMIKLFCGMSGKPALIFGQEIAADAYGKKQLSFRSSSCEEEMEALGDCLPEGYMDMIEAAKRIHDKGLLAHILKGHTYLSQARVETYEKHKEDLKKLRHVMKKYCKDEYDAYFRTMTDHNYSGYVGSVNSGKEKIRRNRGAKKEAYKAFWKETKRLLNMMPQEDQEVFYLKQELEKETLLPKQRTFENGVIPNQVHLAELKKILSNAEKYLPFLREKDENGLTVTERICKLFAFRIPYYVGPLSVKGGAGRNWIQRKETGRVLPWNMEEKIDMAKTREAFILKMVRQCTYMKGKYVLPKNSLRYEAFMVLNELNNVKIRGEKLDVGLKQKIYRELFLTGKKVTGKKLFQYLCVNGILSPDEQEAVTGIDETFHQSLTSYGRFRSILGDEIENREMQKMAEQIIFWGTVYSNDKKMSGELMREAYGELSEKQYLTESQIRRISGFKWKDWGRLSKDFLELQGCSRKDGVKRSLIRALWETDCNLMELLGAEFTFRDTLTGQIQEQEKLLGEFCYHDLEDSYLSAPVRRMVWQTILIWKELCQLMGEAPARLFVEMPRGEGEKGKRTVSRKKRLEELYQACKADSRNWLKEIQDLSEDDLRSRKLYLYYTQRGRCMYTGHPISLEDLLLGNRYDIDHIYPRHFLKDDSLENNLVLVEKESNGHKSDTFPIEASVRRDRQGLWKSLKDGGFISQEKYKRLTRSWDFTDEELAGFISRQIVETGQATKYITGLLDRLLPETEIVFVKAGNVSAFRHQTELLKSRLVNDFHHAHDAYLNIVVGNVYYTKFTQNPANFIRAYRRDQKGNAYHMDKLFWYDVVRNGAVAWKAGQAGTIGTVRAMMARNTPLLTKRVYEAHGGIAEQTIYSAGEAKERGYIPVKSGDERLRDVTKYGGFSSVSGAYYFLVEHEKKGKRVRTLEQMPIYLKTSLEKDEEAWKNYCIETLGLVRPEIRWKKIRMRSLVKRNGYLMNLAGRTGRQIYAENAVSLCLSQKWVNYIKGLENFKESGKEEDRRENKEKRITKEKNELLYQELVIKHRDTIYRRKPNPIWTKLIEKQAVFAELSVREQVNVLLELLKVTQCQNLSMDAKEIGVKASPDKIGNEVTAQEEFLLIDQSVTGIYSCTIDLKTIKRPAATKKAGQAKKKKDYKDDDDK

SEQ ID NO: 92 - protein, 1388 aa, synthetic construct
MAPKKKRKVKQKYYLGLDMGTSSLGWAVTNEKYSLLRKKGKDLWGVRLFEEAKTAADRRSYRTARRRLQREKARIGYLRELFSEEINKIDAGFFQRLEDSKYHKEDKREHQPFALFADKGYTDREYFEDYPTIFHLRKALLDIENEGKTFDVRLVYLAILNMFKHRGHFLNANLDDKSGGDLKEKIHILTSMANKLFDDISFKTVDIKDIEQILASKDYSNSTRLEKLLELFELSKTKNKVETEIFKMICGLKGTISKIFANESMDEEAQKLSFSFRDGNYDEKIVEMEEALSEESYEFIMIMKQVHDWAVLSNIMMGEEYLSVARVKAYEKHKKDLNMLKALLKNYSIKEYNSMFRIMKDNNYSSYIGSVISQETIRRKGKYTTDDFYKNVKSIVLKCEECTEKEYILSEIEKKTFLPKQNTTSNSVIPNQVHKKELKRILENAAKYLEFLNDKDDTGLTVSEKIVRLFEFQIPYYVGPLSNGVCDGKNVWSVRREKGAVLPWNFEEKIDVKQSSENFITKLVNHCTYLNGETVLPKNSLLYEKFMVLNELNNLKINGVKIGVELKQSIYNDVFKKGKKVTAKALIQYLKNIGEIDATEETVVSGIDGDFTNRLANYKKFIEIFKVPTLTYEQEQIAEDIIFYSTVYGESKKFLEERIREKYNEELSENQIKRILGLKFKDWGRLSKELLLLQGIDKQTGEISSIISKMWSDNYNLMELIATDKFSYGYNIEQKTSKIEKVLSDIEYSDLDEIYISAPVKRMVWQTILVLKELEKVMGCEPEKIFVEMARDANAPKKRTESRKKKFLELYKTCKKESRDWKEELEDTEESKFRSKKLYLYYTQKGRCMYSGEEIELKDLFNDNLYDIDHIYPRHFVKDDSIENNLVLVRKVDNAHKSDAVLESSIRNKMCGFWKILREGSFITDEKYKRLMRTDDFSDEERAGFISRQIVETRQGTKVIADLFTKTFPESEIIYVKAGNVSDFRKKFDFLKCRIVNDFHHAQDAYLNIVVGNVYNTKFTQNPMNFIREYNKDPKANKYHMDKLFEYPVSRNGRDAWVTKNAESICMVKKMMEKNTPLITRMNYESHGGIADQTIYSAEDAQKAKGKGYISIKSSDGNLLDTCKYGGMKKYTGTYFLLLEHTKKEKRIRTIEAMPLYLKDKLNTREKIEKYFEQSVDFAYEQPKVILDKIKMYSLIKVDGFYLYLTGRTGNQLSVCNAVQMSLSAGMVKYVRKISIANERYAADKEFEKDENISVQKNLELYEILKEKHLNQIYGKRPNPVGEKIEKGIEKFRSLSVRKQIYVLLQILQLSQLSNQGADLLEIGGEKKTGTSKLNKNITEKQEFKLINQSVTGLYENEIDLLRIKRPAATKKAGQAKKKKDYKDDDDK

SEQ ID NO: 93 - protein, 1391 aa, synthetic construct
MAPKKKRKVNLRNVGSYDVGLDLGTGSVGWAVVDSDGGICHFKGKPTWGSRIFPSAETAAGARVHRGQRRRYDRRRQRLKWLQEFFLEDMNRLDPDFFTRLNQARLLPEDRKEGCADYHWPLFNESDFNEVDYYRSFPTIYHLRKALAEKEGKADLRLIYLAFHNIVKHRGNFLHQDVPGLSARDASAQASTSCLHEAVEEWSSLLDLGVSFDCSNFSRILEDRRLSRSDKKDALMGTFSYGRDQKKFCQAVVSAVLGYQADFGCIFQVEGEGLKFKVSEEEKAEMFVSSSLPDEGASLFDALCSVHSSYVLLGILKDSGGKTLSFCKVRDYEKYHRDLSLLKSLVRTYSPESYRDFFGGSLRQGACPSDYDPEKASGYTKYNLHKTSYEDFQKEIRKLLEAKAKLDDDYHRMMDEFAEGSFLRRLKTSDNGSIPYQLHLEEMHAIIENQKAYYPFLGENADRIESLVSFRIPYYVGPLTQQNAAVDRRGNPRFAWSVRKEGMEKAPVRPWNWDEVIDRAESAEWFIARMTGTCTYIHDEPVLPKCSLLYEKFCVFNELNGARWTQDGDSEVRFDASDREGIFEDLFKRGSVTYKKVEDWLVRRGALNPHVSGGQGESKFESKLSSHLFFCNVLEVDDLSKADADMAEEIILWNTLFEDRAILKEKIEASFGSRLNADQIRKICKKRFTGWGRLSKKLLCDIRVETNSGSKSIMDVLSEGNPNICGATKAMVFMEILRDDKLGFEEAIRNENRDRLKTGFLSVDELPGSPALRRTVNQAVRIVEEITSITKHAPDNIFIEVTRDEDPRKKGLRTKRRYDRIKEALTIFKGESSGVLSELKRRDHKELDDERLALYFMQNGRSLYSGNSLDIRRLSEYQVDHIIPQSYIKDDSFDNKALVLADENQRKLDSLLLDQSIQDNRKDEWRALFEAGLISEKKYRNLMCDSISEGRLKGFINRQIVETSQIVKYVQMMFEGLYPETSVVPVKAALSSQLREECGFVKCREINDYHHAHDALIACQIGRFIQFRHSGIYSNPIGYTKVVRDYVRQLGRQMKYSRKMPGSASFIVSSFLTSGFDPETGELFKDRWDADFECDRIRKYLNYKDCFISRMPEITSGEFWDATIYPPDKNPVLPLKKGLDPKKYGGFSSQKFAYFFVYECTKKDKKVFGFSPVPVCVAQSLGSNSRALIDYAKQLCSESGTEFVRIARKQLAKYQLVEINGERFYLTGKKEVRNATQIAFDQAQTDLLKRAFEGEISNSISLSDIYRYTLDFSDRYSSRVSALLRLRECEQEFAKLPVEIQANLIKSILQCLTAKSNRIDLSAMGGSKSAGCIQPTFVKIFNSDKESFFVIDQSVTGMFEKRVRLGFKRPAATKKAGQAKKKKDYKDDDDK

SEQ ID NO: 94 - protein, 1391 aa, synthetic construct
MAPKKKRKVKEREYFLGLDMGTGSVGWAVTDTEYNLIKINRKRAWGSVLFETSKGAKERRVNRCARRRLKRQKERLDLLRELFEEEIQKVDSGFFLRMKESRYVYDDKRDENGVKPQLPYSLFVDENYTDVDYHRDFPTIYHLRKALMEEDRKFDVRLLYLAIAHILKNRGHFLANMGSDEVNLDLKESFKALLGKWNDMMADDDIMSVTAGSEQLEQIEKTLKDTRIVKSSKKQEIINIIGIADKRFKELASLIAGGKVSLSKLFDRKDYESLEINKISFDDASYEENEEYYAANLEDNYDIIACAKNVYDGMILSNILKGDESGFISAAKVKDYDKHGKDLNLLKRVILEEGIGEDKQRKILYKRVFGVTKNQDNNYSRYVGVVSTKGRKGVIEDKKCTRADFYNFIKKEILPEIKEGDNKEYIINEIEADSFMPKARVKENSVIPYQLHKKELKKILRNAEKYHPFLKETDETGKSVSEKIIMLLEFKIPYYVGPLNVSGSNAWAVRSSGKITPWNFEEKVNIEESAKNFIEKMTSKCTYLKNEDVLPMSSLTYEKFMVLNEINKIKINSEPISVELKQDIYHELFEKKLKVTVKRLIDYLKAEKGYADLKKEDISGIDIEIKSSLKSYHAFKEKFTGVNLSEKAKEDIIKDMTLFGAEPKLLKKRLTSKYPEYENQINSLIKSLKCKDWGRLSYKLLNGLAIDVPGQGMIGTVMYRLWNTNENFMQIIESSDSPYAKLIREENGEARKKGIDYSIVNDLYVSPAVKRQIWKALQVTDEIMHAMGKPPKRVFVEMAREEGEKKRSVTRKDRLIELYKSIKDEKALYDKLLKTDNDALRSDKLYLYYTQLGKCAYTGKKIEIDELMNNNKYDIDHIYPRSKTADDSLDNRVLVYKPVNEDKNDIYPLGKFDSGIYDRMRNDWLIWKQKGLISEEKYKRLTRTTELTSEELLGFVNRQLVETRQSTKAFAEALRYVIPEETEIVYSKAGNVSRFRQQYKILKVRDINDLHHAKDAYLNIVVGNVYHLRFTKDVRKYFNKNGTDRTYNLYKMFDKDVKCGLETAWKEGKDGTVIKVKETLKCDRVLVTRQTYEAGGKLFDVQPKKKGKGQIPLKSGKGNERLNNINLYGGYDSASITYFMLIEGRKKDRQFRYIVPVPLYLKNRIEADEKFAKEFFEDEYKLKDVKLIRKILMQTLMVLEGFKMRIAAKTDNRISFHNANQLQLEQKYYKPIKEIIKFLQERKERKGVTINVNSGITHEELINMYIMFKKKLSDSVYNEMLGKYCDVIENGTAEFKKLTLEEKSVQIYELLKFFRCTSELSDLSMVGGSKNAGTIRISINEVPKRKNLAIIYQSVTGIYEKIERINEKRPAATKKAGQAKKKKDYKDDDDK

SEQ ID NO: 95 - protein, 1395 aa, synthetic construct
MAPKKKRKVKNAKNKNYYLSLDIGTDSVGYAATDENYNLLKFHGEPVWGATVFDAASLNTDRRTFRTARRRLDRRQQRIDLLQQLFAKEIGKIDPRFFIRMEESTLYPEDKADKYTLFNDKNFTDKEYHDKYHTIHHLIDELMKSNEPHDVRLVYLACAWLIAHRGHFLQNISVEKLSDIKDFDRIYENFIAYFDSKGFDKPWNKDSIDATKLAETLKKDSGITQKYKALCELIYNGKPPKEISDEFPFSKEGILKLLAGGTYELAKLFDNEDYAELTNKSVSLSMDDDKLAEIAAEIGDDYDLIENLRSIYDWSILVNILAAKNTISEAKIKVYEQHQKDLVFLKHVVKTYIPEKYDEIFRKTDCANYAAYSRHTDEPHGAKWGKNKVDFSDFLKKIIDKITPSEGDKAQFEDMKERLQFQKFLPKQKDSDNRVIPNQLYLFELKEILKNASTYLPFLNETDEDGISTKSKIESIFSFRIPYFVGPLNERSDKAWLVRKAEGKILPWNFEKIVDLEASENEFIKKLTNKCSYIPGEDVLPKDSLAYHKFEVLNEINNLKIDGEKISVELKQRIYNEIFMMNKKVTRKKIEQFLVKEGFIEKGREAALTGIDITIKSDLAPQHAFKKLMDSNTLTENEVEEIIQRSTYAEDKSRLSKWLEREFPKINEEDRKYICNIKIKDFGRLSRKFLCELQGINKETGEPCTILGALWNTNCNLMEILANDRFTFTEEIEELRKTYYSEHGDLKLEDRLDEMYISNAVKRPIYRALDIVSEITKAFGKPTKIFIEMARGGSKDKKRERTKSRKDQILELYDKFKNEDVVHLRKQLEEMGVSADNKLQGDKLFLYFMQMGKCMYTGKPIDIANLGSKLYDIDHIYPQSYVKDDSIINNKVLVLSEANGLKGDKYPIEESVRNQMRAFWNLLKEKEFISEEKFKRLTRSTPFTEDEKLGFINRQLTETSQSTKAVATLLKEKFKNTEIVYCKAGLTSEFRQEFDLFKSRLFNDLHHAVDAYLNIVTGNVYHTKFTKNFNVNTQYSIKTKALFTHPVICNGKIIWDGDKMLAKVKETASKNNAHFTKFAFFKKGGLFDQMPVPAAEGLIPRKKDLPTEKYGGYDGVSTSYLLLVRFYTSKKSEVMFYPVPLMLAEKFEKEDGFAEEYILSTLRTQKNNKIQKIEILLKGRKFKINSVLSLDGFRVAIAAASLKDGRMAFHPLMQFSHSLQTVFYIKKLEKLVEKTKENSKLIYDAEHDMVTVEENLKLYDIYLSKLQTIYSKRPGNGNIALDLANKKEVFSALPPIEQAKVLLQIHSLFCRNSFSGIDLSLIGLSKKTAIVRKSLSLSSWKSDYNDVRIIDSSASGLWEKKSENLLELLKVKRPAATKKAGQAKKKKDYKDDDDK

SEQ ID NO: 96 - protein, 1416 aa, synthetic construct
MAPKKKRKVAKKDNKVLFKFNEDKMKNVKEYYLGLDMGVGSVGWAVTDTNYNVIKKSQKSLWGSRLFEEAETAAGRRTYRSSRRRLNRRNQRIKLLQEYFAPAISKIDPGFYIRLKDSFFYEEDKTEQQKNTLFNDSSFTDKDYHLAYPTIYHLRKELIDNPKYHDPRLVYLACAHILKNRGHFLYGAQKFNTEALLEESIKDFNELYYEYFDIKLFNDEKIYEIESAILEKNLSRSGRAKTLEGLLNDKDKRAKKYCNLLVGNLAKIEDLFPEELEIEESQSKPKFSEGNYDEPDTQDYLLENLNEEQLAIVDEAYKIYSAAILQDLLSNKSGHKFSTISEARIDTYNQHKKDLKLLKEVVKGIEKENPSAKGLYNKIFKENTKKYKNYVAYSGHTSSDDKKEKIGVEEKTSYEDFSKFLKNNLSKYEKQDERIEEIIEQLDLNNFLPKITTTDNGVIPYQLHLDELEKILDNAKKYIEELNEKKADEIKQIFTFRIPYYVGPFDTRSEFSWIKRESFESIRPWNFNEVVDLDLSSERFIKEMTNKCTYLIGEDVLAKNSILYSEYMIRNQLNTLNYVSPVTKDIKRFDHETIEYLYEKLFVENTSVRVTKKAIANTLKNYNSIFADITSDSIGGMDLEIPHKLKALQDFNRICSGKLNNKEIDKIVEKITVFPDDSEMVARFIRKEEFSDKLTEEEIKKLSRLRYTDWAPLSEKFLTGIKTELNNGRKYSIIDILRKNPLNPNSPLNLMQIINLKEFNFSELIEEHNLGETNDPYVVDEELLDSLRLSAPVRRSINQTLLVCEDIFKIMGGTPKKIFVEMTRSEGEKGKRTTSRKKQIEKLYESIKTDLKDWYSIWKDKLKSIDDSEYQAKSIYLYAMQAGRDMYSGQVIDEPRNLEAYDIDHIYPRSKTKDDSWNNLVLVSKKSNAMKGDKVLSEEIQNKNKDYWQMLLDKGFMSEEKYRRLTRKTELDGEELRSFVNRQIVETGQSTKAITTIFNRILPESKLVFVKANLVSDFRYNDGKKSKVISDLNFPKVRDLNSYHHAKDAYLNIVVGNVYDTKFTEGFFESLRNKEHPKYNLERIYDKNIADKNGELVWIAGENGTVATVKKFMNRNNIFVTYRTFKRTGKLYDVNLNKKGSGQYPIKTSDKRLMNLDKYGGYNGTKGSHYCLAKIKKGKKIEYKLLTVPMIFENRKSINGETLIEYYKNQGENIAEIVTDDIKINTILEIEENLYRIQSDHDKSRIISPEYCVAHYGLKEEKIIKDIERITLGKTIRNDINDKVLDDIYDGIRLKLNSEKLKKYSFYEELNNDMLDNKGIFNKLTIKEKCECIMKIVQIISGINQETDLRMINLKKTIGRKARSRTIKGNKLRILHQSPTGFYSSWEEVSLEKRPAATKKAGQAKKKKDYKDDDDK

SEQ ID NO: 97 - protein, 1419 aa, synthetic construct
MAPKKKRKVNLRNCSGEYNIGLDMGTGSVGWAVADNDGQLFHFKKQPTWGSRLFESANTAAMARIPRSQRRRYIRRRWRLDLLQSLFQDEVEKVDPEFFIRLRQARLLEEDRAEGHSDYRWPLFNDTDFTEHEYYKLFPTIYHLRKWLMETDQQADIRLIYLAIHNIVKHRGNFLREDQKSLSAKTAKPDDALHAFFKALNDWCASRGYETVNDTASEIIRVFNDEEAAPSDKKKRIAALLCISLGDDSAANRKCNEALAAGMVGLKAEFKNVFGEFQAEKTAVYLSNDEDVEALREMCPDDSVDLFNRVCSVYSAYVLQELLSYAPGETISINMVKKYEQYGEDLALLKNLIREYARESYDNFFRGPKYPGTNIYDVSKVQGYTKYNLGTSKLSYDGFEKAVVDLLGKTSAVNDERYQSMVDAFEKQRFLRRLKTSDNGSIYYQLHFEELKAILKNQSRFYPFLIADEKKIESLVSFRIPYYVGPLTSRNAAIDQHGNKRFAWAERKPNQDNTPITPWNWDSVIDRNKSAEKFIKRMTGTCTYLQGEEVLPKCSLLYEEFCVLNELNGLRLTIDGDREYRLDAAQREGIVHDLFHCKRSVSYKQIEGWITREEGFEYPHVTGGQGASGLESKMGSYLFFCKEVFGIDELDPKDYAMVEEIILWNTLFEDRKILHEKLVEKYGRQAGGPLSEEQIKKICKKRFTGWGRLSKKFLTGLKVQTEAGPKSIMDVLREGDPNSDSRRGRAMVMMEVLRDENLGFQKMVDDFNKNYFEANGKLAEINELPGSPAIRRSLNQTIRIVDEIAKIAGHAPTNIFIEVTREDDERKKGRRTNRRYDELKNALERFKKEDPEVWHGICDTAPKDLNERLTLYFMQRGKCLYSGRPININQLSDTGLYEVDHIIPRAYIKDDSLENKALVYREENQRKTDALLIDSSIRQKMSDYWRMLHNAKLIGDKKYRNLLRSTIDEKAMKGFVARQLVETSQMVKIIQSMLKVRYPNTKIVPVKASISHNLREEAGFIKCREANDFHHAHDAYLALRMGLFIQKRHPGVYENPIGLTRVIQKYVRSQSEEFKRTHHFPGSAGFIVNSFMSSGFDKETGEVFKDDWDAEAEVEGIRRALNYRQCFISRMPYEDTGVFWDATIYSPRNQKKKPVLSLKNGLDPQKYGGYSREQFAYFFVYEARKPGKDEHLFCFAQVPVWLAMRIKGNQDALDSYAQKLAQSEGFEYIGIERAKILKKQLIEINGDRLIVTGIKEVRNGKELAFTSDELALISRITSQKELNESDNELLNEIWNRLVDCGNQIGWHLMAQLKLGGYNEKFSKIDSKSKSEVILGLVKIINATTNVVDLSLIGGKQHAGCMLLNYSNVLFDSNTDFYIVDQSVTGMFERRTRIGFKRPAATKKAGQAKKKKDYKDDDDK

SEQ ID NO: 98 - protein, 1426 aa, synthetic construct
MAPKKKRKVNLRKASDYSVGLDLGTGSVGWCAVDNNGHLYSFKRKPTWGSRVYDSAAPAADARQFRALRRRYNRRRQRINLLQGLFSEEMNHVDPDFFIRLNQSQLLKEDRDETCKDYACPLFKTVADEKEYYKTYPTIYHLRAALMHANQKMDLRLVYLALHNIVKYRGNFLYQEYAHLSAKDAGLSEQSSNFLTSIEHFEDDRCISFTYNTAEIIHFLNNLKVTRAQNREEWQKLFVCDTSDDITKTQANAITKCIAQAIFGYQADFSALFRTEKEKSKFKLSQEEKVTAFEELCPTEFLPLFNALKAMYSAYLLTTIIKDSNGGTISNAKISQYDAYHNDLAKLKELIKRVLGKDDYDTFFKGVYYKNTKLYNKQKAEGYTAYNLGKLSYDDFAKELKKLIIKLEKSGVLSAEDDAWVRQIPTRLDNEEFLRRLRTSDNGSIPYQLHLEEMDAIIKNQGKYYPFLLKEKDKIESLITFRIPYYVGPLTLKNAARDAYGKPRFAWIQKKENEAHTRILPWNWEDVVDKHATAEAFIRRMTGKCTYLYAEDVLPKCSLLYQEFCAYNELNGARWTTDNDQFNRFSADYRESIYNDLFVMRKGKVTYKKIENWLEQQGELHPHVRGGQGENGLESTLSSYHFFKDLFEFEVLTELQRQVIEQIILWNTIFEDRTILNEKLNSRSFQMEFTAAFNNPLTADQIQKICKKRFTGWGKLSKKLLTGLFVDIDGERLTILDLMIHGDVTDGRKGRALIFQEIVTMEQFKEAISKTNEEALSKCIIDIDDLPCSPADKRTVNQALRVVEEIASIAACAPSRIFIEVTREEDTKNKGKRTDKRTSKLEMGLKKLRDSENTKAILAELSVHKNLDEKLTLYFAQNGKSLYSGTPLDINELSHYQVDHIIPQSYIKDDSIDNKALVLASENQRKSDSLLLEDSIRRKMSNTWNALFKAGLMSEKKLNNLKCSSITDRRLKSFINRQLVETSQICKYAMQLLKEKYPHCEIIPVKAGISSGIRHTWNIAKCREANDYHHAHDAYLACEVGRFIQLHYPKIYSNPTAYNKEVRGLIQSNIVHSASEGNGRYRLPGDSGWLTYSFAHKKTAAWDCDAERDRLLRYVDYPDCFVTRMAYIETGAFWKQTIYSPHNEKAKDLIPLKKHLDTNKYGGYSSKKYAIFFVYASQNSKGVKECHLSGLLIAKLAVATDNATGKIDMHRLIKLEEQLVAARGTSIQILQPIVFKNQMIEFGKRREIITGLKERRNAKELAFKQQHMRLLKKWNDDIQEEGRKTTEVIDEDAQLNEMFDLILGKADHCAPALHNKLLNIVGADVDDYARIEQKFAAISDKDTKKRVLFKIISNANAQENQIDLTAIEGSKHFGVISDWPKKFDIIEQSVTGMFEKRIHIGIKRPAATKKAGQAKKKKDYKDDDDK

SEQ ID NO: 99 - protein, 1432 aa, synthetic construct
MAPKKKRKVNLRKASDYSVGLDLGTGSVGWCAVDNDGYLYSFKRKPTWGSRIYGSAAPAADARQFRSLRRRYDRRRQRLNLLQELFSEEMYHVDPDFFIRLNQSQLLKEDRDETCKDYACPLFKTAIDEKQYYKTYPTIYHLRAALMHANQKMDLRLVYLALHNIVKYRGNFLYQEYTHLSAKDAGLSEQSSNFLTSIEHFEDDRCISFTYDTAEIIHFLNNLKPTRAQNRDEWQRLFVCDTSDDITKTQANAITKCIAQAIFGYQADFSALFGTEKEKSKFTLSQEEKVTTFEELCPTEFLPLFNALKAMYSAYLLTTIIRGSNGGTISNAKIAQYNAYHDDLAKLKKLVKRILGKDKYYTFFQGVYYKNTKLYNKQKAEGYTAYNLGKLSYDDFAKDLKKLIEELRKNGVLSAEDDAWAQQIPTRLDNEEFLRRLRTSDNGSIPYQLHLEEMDAIIKNQGKYYPFLLKEKDKIESLITFRIPYYVGPLTLKNAARDAYGKTRFAWIQKKEGAEKKRILPWNWEDVVDKHATAEAFIRRMTGKCTYLYAEDVLPKCSLLYQEFCAYNELNGTRWTTDNDQYNRFSADYREGVYNDLFVRSKEKVTYKKIEHWLEQQGELHPHVKGGQGENGLESRLSSYHFFKDLLKFDVLTVQQEKVIEKIILWNTIFEDRAILKEKLKAQSFQAEFTAAFNNPLTAEQIQKICKKRFTGWGELSKKLLTGLSVDIDGERLTILDLLIHGDVTDGRAGRALIFQEIVTMKQFKEAIVKANEKALSTCVIGINDLPCSPADKRTVNQALRVVDEIASIASCAPSRIFIEVTREEDTKNKGKRTDKRTSKLEMGLKKFRDSEDTKAILAELSAHKNLDEKLTLYFAQNGKSLYSGTPLDINDLSHYQVDHIIPQSYIKDDSIDNKALVLASENQRKSDSLLLDDSIRRKMSNTWNALFKAGLMSEKKFNNLKCSSITDRRLKSFINRQLVETSQICKYAMQLFKAKYPHCEVIPVKAGISSGIRYTWNIAKCREANDYHHAHDAYLACEVGRFIQLHYPKIYSNPTAYNKEVRGLIQSNIVHSGSEGNGRYRLPGDSGWLTYSFAHKKTAAWDCDAERDRLLKYVDYPDCHITRMAYIETGAFWDQTLYSPHAGKKDLIPLKKHLDTHKYGGYSSKQYALFFVYSLQKKKGNKEYCLSGLPIATLAEATHNTTGKIDMDRLVQLEEQLIQLEKQLITTHHAPIQIVQPIVYKNQLIEFKGRREIITGKKERRNACELAFKQQHMRLLKMWNGDLKGKYREKKEDVDEDCLLNEMFDLILEKTSHYAPMLHNRLLDIVNANANDYSRIEIIFAAIKDQNVKKSVLFNVISNANASKNMIDLTAIGGSANFGVISDKPQQFDIIEQSVTGMFEKRIHIGVKRPAATKKAGQAKKKKDYKDDDDK

SEQ ID NO: 100 - protein, 1434 aa, synthetic construct
MAPKKKRKVKKIFSQQGQNYYLGLDIGTDSVGWAVTDLNYKLLRVNNKNLWGVRLFDEAQQASARRLQRESRRRLERRRLRVNLLQQIFAPAINAKDSNFFARLDDSNLYGEDKREKTKFSLFSDTNFTDIDFHKKYKTVYHLRAAMMSEANPDPRMVYLALHHIVKYRGHFLIEGESMNAVENIAMPIEEIKRYLADRDESNCNDCFDLSKTDSFRELLVQKVGKTTKANSLAECFSVEKHNKKFLTVLKLVAGCSVSVKDLPVECDDEKLKICFDGDWENQETVLREALQDDYVLIENAKLLFDYSQFKAILGNHKYLSQGMAEKYKKHEDDLKALKYVLRKYFSKEKYDDMFRNASDNNHTNYTAYSGRVSFGRKNGKKVVLEVKSNSREYDDFIKYVKEVLSSSETAMQDEVSKRILTDIEKKEFMPKQVSKNNATLPYQLNLAELDAILENASKYSEYAFLNEKDEDGISARVKIRSLLTFRMPYYVGPVNNSSGKYWIVKKDDGRIMPWNYEQKIDLEQTERNFIERMTNACSYFPEEKVLPKCSLLYEEYVFLNIVNKIKINGEPIPVSLKQRLSDYYAETGANKLSKKFLKRWLIEENVAQNDDDLQIEGFDDGATVHRRTFYQFVQIFGSKQAVLENLKDIEEIVKYATISGSEKSNLEKWLVKNYKYLQKEQIKRIKGLTCKGWGRCSQKFLITKFGTNPETGEVNSLSVMDVLRDTTLNFMELWNDEVYGFSKAFDSENNKSYEGISYSIVGELYCSPAVKKQIWQALTVVKELRGILGCAPSKIFVEVARGSDSKKDKLEERKRTTSRYEQLKKVFEDIRRQNDASLAEDVYDKFVKVGERKEKLQNQKLYLYFLQNGLDAYTGEPIDYNHLELYDKDHIYPRSKVKDDSIHNNLVLTYRPQNAVKRDDYPISEKIRNNPKVKALWKTLRAQGLMTEEKYKRLTRTTELRDDEMADFINRQLVETRQSTKEVIGVLKRVFADSEIVWSKASNVSDFRALPKRIGEVSVPRFVKCRELNDLHHAKDAYLNIVVGNTFNVRYGHNAKYWVKEHPTEKLTSSAKIYECDVKTQKVTAWIAGDNGTMAQVEKTMRSNAVLFTRESKVAKGALFNATIEKKDEKGEKNLVPLKNCSSNCGKRAKMSQTSKYGGYNSESRTYYMLVKYVERKERKKGTVEKVKYKFLGVTAKDAHMLTDDASRVEYCENFGLAEPIILLDKIKIHTMFEFEGTRLTLAGMTGNRLVWRLAQQNVQDEETERYLKKVINVLEKRKKDADYKICDKDGVSEEQNLILYNSVVDTLLSPKYAGSGSLVSFAKKLSATNLMDKFKELSVEKQCVVLGEICKVLQCNALASDLSLLGEGKTCGKILTQSTLDNLDEISVVHRSVSGLFEKKIPLYVFDKKRPAATKKAGQAKKKKDYKDDDDK

SEQ ID NO: 101 - protein, 1452 aa, synthetic construct
MAPKKKRKVNEKRPYYIGLDCGTNSVGWAATDEKYHLLKGTRRIKNDKGLKTKKQTLWGFRLFDEANTAAERRVQRSTRRRGARAKNRLKLLRMLFRDEIAEVDPGFYQRLKESFYYEEDKRLRRNSKNTLFNDQNFTDRDFHAEYPTIWHLRQSIIDPKNKDKKFDIRLYFLAIQHILKHRGHFLLQGNIGDGGADFLPLFDAFRDEAERLGCRIADVPNEVGALLMKESSKTDKKKDLKNILYLEGDELDEDAPKGQAELAGLLVGSKVNLKKIFAIEDEEKFPYSFAEGVFEDKILDIEQAIGAENLDLVYAAKNIYDYVVLHNLLGKHKMISDAMVVNYELHEEDLGKLKKIFKPHKELYHKLFKTELYDEKFPSYDAYIGKAYTQDKSGRKSSKSINQEDFNKHLHKLLTEIKPKTSPDLLPLVDELLERTETGEKSTLSFLLPKQRGQAKGTIPMQLHANELNIILEKLQRDYPSFAVEVAGEKSEYNTKAKKILKIHSFRIPYYCGPIVKRKYDDNGKLVPKGKSQFSWADEEISELVYPWNFDELVNKDGRAQNFIRRMTNECTYLLGEDVLPKNSLIYQKFMVLNELNNLKINNQRIDNRLKQQIFECGYEKGELKGDITLKKLERWCKDNSLIGNNDELSGTSEVKNLPKYQTYQDFCRILGDDFGQKYTQTKLEKIIELITILGDEKDMLGRSIQRELDCDSELAKKLSKLSYKDWGRMSAKFLDGIVVNNHTILDYLWEDNKNLMELLGQEVGFGKVVEQYNDTKLPASAKINYQDVVKLYCSPAVKRSVWQTIKIVNELVKNIGCAPAKIFLEVTRGEDPKSKGKYTLARKRDLETKFKAVKTDNARAILEQLEGFEDRDLQSKKLFLYFSQMGKCAYSGEPINLEDLNNSQLYDIDHIYPRSKTKDDSITRNLVLVKASLNREKTNTYPISESIRGKMRGMWAAWLRAGLITKEKYERLVRSTPLTDDELGGFIARQLVETSQSVKAIRDLLSRIYPATKIVMVKAGQVSEFRHLMGGDKKDKTGNICQKGKYEFIKVRDLNDLHHAKDAYLNIVVGNVMHETFTDNPYEWIKKREGKEYSIRPERIFRESQTYQLSDGRQTSYPKVRGWDFAESTKIVSDTMKRNDVIWARMNYVESKEISDLQLVGKGGKSENLLRIKRQDRLDPKKYGGYNSLKGAHFALIEAKNKKGEVERRLIQIPIIARNDVEKYVNENYPGAQVIISVIKIKSKLKIDHIPICIMNKDSESKNGYCHALQALFPANHNYYLKKISAVVKKDQLARSNYEISERDEVNIEGNLAIYDLFCRKLNLYSGLPELASVIPKILSSKEKFARLDLKQQCLTLSQMLNILSCGPQNAKLGNIGCGDNAGRIRISNDKLFKFTELYLVNQSPTGLYEEIIDLKTVQPKKSWKAAKRPAATKKAGQAKKKKDYKDDDDK

SEQ ID NO: 102 - protein, 1458 aa, synthetic construct
MAPKKKRKVKEKQPYYIGLDCGTSSVGWAVTDETYRLLKGTHRIKSDNSTKTKRQTLWGFRLFDEAETAVERRTHRSARRRGERAKTRLKLLRMLFHDEIAKVDPEFYQRLKESFYYEEDKNLQKKSKNTLFNDSNFTDKDFHKKYPTIWHLRQAIINSDDSQHFDIRLYFLAIQHILKHRGHFLLSGSVGDGGIDFENLFESFRTEAERVGYDIADIPEEVENILAKKASKTDKKKELKEILYLEGDDLGEDVPKGQAELAGLLVGSKVDLKKIFSAEDDEKFPYSFNEGVFEEKLPEIEQAIGPDNLDLIFASKNIYDYIILHNLLGEHKMISDAMVSNYDLHQSDLKKLKQVFKPHPEIYTQLFKDKKHGTYDKKSNRFDANKNSSYGVYAGRDYQAEGDRNGHITTSQEDFNKYLYKLLEEIKPKSLPELTSLIDELLDRADTSEKSISPLLLPKQRGQTKGTIPMQLHANELGLILEKLQRDFPSFAEIVSGEDESYNTKAKKIAKIHEFRIPYYCGPLVTSRKSQFSWADKEILELIYPWNFNYVMGKTGQIDSRANAFIRRMTNECTYLVGEDVLPKCSLTYQKYMVLNELNSLKVNGHRIDNELKQKIFERGYKGSEIKGNITLKKLEKWCKDNSLIGSNDGLSGANEVKVLPKYQTYQDFQRILGIDFEKKYALDKLEKVVEAITVLGEEKTMLKKNIERELGCDDKTATLLSKLSYKDWGRMSAKFLDGITIKNRTILNYLWEDNKNLMELLGQEVGFSQIADEYNSTKRPASTKVSYRDVDGLYCSPAVKRSVWQTIKIVNELTKNLGYAPKKIFLEVTRGEDEKSKGKYTLARKKDLEAKLKAIKTEDAEAILKELNSGKYEDRDLQSKKLFLYFSQMGKCAYSGEPIDLEELNNSQIYDIDHIYPRSKTKDDSITRNLVLVKASLNREKTNTYPISDSIRSKMHGVWSIWYQKGLITKEKYERLIRVAPLTDDELGGFVARQLVETSQSIKAIRDLLKRAYPETKIIMVKAGQVSEFRHLMSSDKKDRDGNVYERGKYEFIKVRDINDLHHAKDAYLNIVVGNVMQETFTDNPSEWIKQRDGKEYSIRPEKLFRASQKYQKANGEETIYPEVRGWNFADSIEIVSNTMKRNDVIWTRMNYIESKEISDLQLVGKGENSDGLLRIKQQKRLNPKKYGGYNSLKGAHFALIECRDKKGNIQRRIVQIPIIVEDNIEKYVIESYNDAKVILPVIKYKSLIKINGFPMHISRKGGEVAIGFYHAVQAFVPSKDMKYLKKLVNFSSKYKQMHDKNEVNMEKEPIDKGCNEQLFKIFLKKLKAYRNMPELGGKINEIEDCKTDFDNLNLRDQSLVLVEFLKILSCGPETANLLSFVPKAGAVGKGKFNDNILNYDSSFLINQSPTGLYEEVVDLKTVQSKAQKGKESKRPAATKKAGQAKKKKDYKDDDDK

SEQ ID NO: 103 - protein, 1471 aa, synthetic construct
MAPKKKRKVKIFVSIDQGAKNTGLVLAEVDSNGQLQNLEGNVVSINENEFKTSQLDRRTKRHQRRRYKRRKLAKRLLRLILEKEFGWNFSKKCIKQKEFIFGLLNRRGFSYIVEDLDVETLNNEDFIDFIVKLFPDQLNKDEKLTEQIEKNYSNPEWFKSILDNPNSKFVSGKNKNSNEQTLEGYCKDKNLKYSKELERFYNKFIGTISQFYDEMSGGAKHRKKYFEEIKTVIYNSNPLDEIFRGSKIDEKKFFKIVAHISNFPLRVLRKYFNDKKMKDGGYWDDKRLKKIFLREVRSWHTSGNNELKKRRKRLISLLTDPNKGILEFWFELDPIETIPPYEDMNNRNIPLCQTLYLDPEKLNEKFKGWKAILNKLLEEEKDSKIKEGLLENKWDSIEKHKIFYHDLYKKCHLKLKPKISKDDLLARTLQRFFDRVRDKDPYKFRLIALSKKVDSDEYKDAINNLKKVICENEIEILKGIAKTYYAEQENAKKGLWDEKNSILKKCNLHTKHKINLSHIIIGDILDVRMSPKETEDFYNFLKNTRIERKTLIGIASECSEILKKEGNTLRASLETVLYYNNNERELDKKQEYLFKIYELVEKGAKEIGNYLGKNNSSRYADIWSFAQIYNVLEGDRHGFSKICEICHEENALRSSVMNEEGATFTRLFADSVRPFDGVVARLISKQADVISGLIIKKIGSLKVNNDEEINISLIAEQNEFLFEEELSSLKGKTSDKDKSEYDSIFNNKLERIKSFNTYCPYTGEKIGDNGDIDHILPRSWTKRVYGAIFNDEMNLIYSSTRGNRESKANRPDGLWDFENLSDSFLSELYDGITDRETIKNTINNTLEKLGILNGERKDKIVFLRLDKDTQRDLKVALFTPEFRDKLIPYLNNSLSAKVNGTQAYLLKLIIKRLREKYPNLKATISRVDSSLIQKFRNDISKEDPALSKNRENQSLYSHTVDASIALFFNTEESDFKRCLPPGIKIIEAKARSQIHKIKKGDFYSTSVFKDGIYGEKFVPVILFKEKLYFGFDTKNCVEILNEKETIFDLLKPYLRYRNDNKKIVKAFEKSFEDWKNISKNKFLRFFVDKIAAFEFFEKVAKQPSDDMEKVTFHLLEGLRYTTQKIEIMSLLIDSNGKKYKTKEKILSKENFNIEINISPLKIENEDIKIEGSLTFPARTFLEKIVDSDEIKNKLGNDVKNKEEDFKSINKFLKNLYGRKNESDPRVKARKVFSVDIIKNPSGGFRIKRKTPDGTIYQLVEIKDRATIGFEVRDGKIDKNSAILHPVLYNDRNIVPVGALYKESPKNSVLMDDWREITLEDDEKKFINRLWVCPGTKSRSYYRIELLTEQFKKSLFNNITSFSISQDKQDEFYKILPLKLKFDLDKIDFLKDDKIRKILVGPRSSEKNNIKQGSMIVFEATSEHITLEYEANGFMPEEAQRRYLEVKKKRPAATKKAGQAKKKKDYKDDDDK

SEQ ID NO: 104 - protein, 1485 aa, synthetic construct
MAPKKKRKVNSKLICPIAIDLGAKNTGIVSGSITDKAEFSFKGAVISVDDKTSWSMTDRTARRHQRRGIKRRKMAKRLFWLILLHEYEIKYKNLTVRQQEAFNGLFNRRGFTFASGGDENKERDEIIKSSEIEIINIFENKVPELFADKKGDLLDRISQNQKLPESIPFFEHKLDKSVFRDWAKESNLIEDSEIEELSKSFEKTYKALKDYYQSALREQMGSKHRREYLVEIKKDIDTYFKNEDLSFSRLFEKKVDSEKLYRLIGNISNLQLRVLRKYFNQPEGGSKEKLHIDIWDKEKLRILIWRWIESWHVDKNEGEIRQYRSEMQSNRNLKKGGNIISFLTEISPEKTIPPYEDQNNRRPPECSSMHLDAEKLDKLFPGWKELCCVIHANFKTDIDMGKIYSDDTCREVNIENSKELCLLLQRYLDRSMRLDSLEIRKIVSKNEKERKNYISDKIESVLGNNLTKLLYFDLAPKYYSEIQDARNGLWDELNHNSILKRCGKNPPHKNNISHLLVGNILQHDFDEKSYMKFIDECWKTPITGRTTLSSMCVKIEDIRKRYGNSFNEFYKELLVSIEIHNKNVKNEKKIIEFKPSDGIEQDIYDVYKRIKPASEVISKYLCHDSSVSEKYSNPFTLAQLSNIIDKDIHGFSKDCKICSYENKWRMQLNKYTTEDKTDYCANAVRLSSDTVRPFDGMMARILDNQAEEIVKLKIKEIDEIIKTNSKSDLVIPVCIEQNSFNFTSDLADIKRSSKRKDLLKRKEASQKREEEYFTNKEQRIIYASKGLCPYTGEQLDVKGEIDHIIPRAKTKKISNTIIDHEANLIYCSRKGNQIKKDKEYSLSNLNAKYLNNLYGTANTKDIETQIETSIEKIKKLRQTFVFTDLSENEQRDFRHAFFCDKLKDSLLDYLANQIKARVNGTQAFFAKLIIRKLRKHLESKGLRAEFIVIKIPSSKEGGVSFIRKKIAELRADIAKQPIQPIYSHIVDAACVLYLSFNENEIFNKISAPVVFKTTDDISLFEEILPKSFSIEKGEKRKIYERETKIDFSSVQIFKDGIFAEHFVPVIINAEGLSFGFNLKNRSICVKNAELWFNEIKDYLNLKDIYRDKTIEELVVLSVNGFIQISFDKTKCLELLQKASRDVSLYSENESKVKILEGLRYTTARMNLEDIVFLKNNKKITGIVEALKTDLFTFKVNFKSLGKDFGSFHELQLILPSINEAKDFHTLIKRTCDITDGEIDYSELFIKIYDEKFNNSQQSISCRKQKTRKTSLPVIAAPSGGFRLRRKNKDDSSIYQLVASNAYVSGFDENLKNISIAKHFSKSRNIALISEFNNFENIKTSISLNQWITVEPFEPYIDIIDEIQACPGTKSRFYIVLKLKNETFLRDMVTKEYLNSISGNILNVYGVMKKNDYKSDFFKGSLDKPRETIFIKELSDDYIKLRYEAEGRKIKDLYLKSLKNGGKRPAATKKAGQAKKKKDYKDDDDK

SEQ ID NO: 105 - protein, 1092 aa, synthetic construct
MAPKKKRKVMSTMSYILGLDLGVASVGWSVIEIDENEMPIRLVDLGVRTFEKAEVPKTGESLAKSRREARSIRRLIARRVRRLLLAKKALLEEGILTQNDFLTKSIIKDLPINAWELRAKGLDHKLTSKEWATVLLHLVKHRGYLSQRKNESDTADKQLGALLSGVKENHTLLQENKYRTPAELAICKFEKEEGHIRNQNGEYIHTFDRLDLQAELHLLFEKQRQFNNPYASAKLEEKMDYLLMYQKPALSGEAILKMLGKCSFETQEYKCAKNTYSAERFIWLTKLNNLRILTQGSERGLTESERALLLNQPYQKAKLTYTQVRNILELSESEIFKGLRYGNVEDKKMIEKETLMELKAFHQIRKVLEKANLKTEWQGLATKPELLDEIGTIFSLYKTDADITAQLQDKISAPILNALLSGINFDKFINLSLVALSKILPLMEQGQRYDEACTSIYGDHYGVKTKEEHLFLPSIDKDEIRNPVVLRCLSQTRKIINAVIRLYGSPARIHIETGREVGKSFKERQKIEKNQLENKAKKERAIKEFKDLFPYFIGEPKSKDILKMRLYNEQQGKCLYSGKTIDINRLLEKGYVEIDHALPFSRTWDDSFNNKVLVLANENQNKANQTPYEWFDGKNNTTKWQQFVALVWGSHFNYHKKQHLLLKNLPEGFMKRNLNDTRYVARYLMNFINDHIQLTGKGKRRVFASNGQITALLRARWGLMKVRGDNDRHHALDAIVVACTTPSMQNKITDFVRSKEMNIFSGEFIDRNTGEIKQIHFPEPWNYFRNEVMIRVFSHDPLLELEQQLPSRPEARHQYVTPLFVSRMPTRKMTGQGHLETIKSAKRLAENESVQRIALTSLKLNTLENMANKDKEKALYQALKERLEQFNNDPVKAFAEPFYKKGGQQVKKIRVKQIQKTGVIVHQGNGVADNASMVRVDVFEKANKFYLVPIYTWQVAKGILPNKAAIANKNEDEWQEMDESFTFKFSIHPNDLIKVTTKKEVYFGYYVAMDRHTAAINIREPDLERSKGKDGLHRGIGVKTALSFEKYDIDPLGKNIRPCQPKARQPIRKRPAATKKAGQAKKKKDYKDDDDK

SEQ ID NO: 106 - protein, 1367 aa, synthetic construct
MAPKKKRKVEQKDYFIGIDAGTSSVGWAVTDPAYHVIKKHGTALWGVRLFEEAATAEKRRMARSARRNRDRKVFRLKLLRELFAEEISKVDPAFYLRLDESKYWEKKVDTKYCLFSDPQFNDRDYHRQYPTIYHLRDELMKSDAPHDVRLVYLAVSHLIKHRGHFFLQMDEDVSQPEFGDGWTALVEDLETILGVHISCCDLDKLQQVLCDKMTVREKQKQLKKLITVSDAPDMPPFTCIPDLLSGKTCDVSKSFGIMLEGDEKNALKVSLSGEDLSDEEKIETYQKHLEEKLQILEDLKVLYDWGILVHILHGSASISEAKVKSYEKHKSDLKKLQRLIRREYREKYAEVFRQNKKKLDNYSAYTGHCKGVNERYRCNREAFYKYLQKLLKSSTSADAKEIMSEIEIGTFLPMQRTNENSVIPYQMNLAELKKILDQAAGYLPFLNEKDEAGLTVREKVESLLTFRVPYYVGPLDHHMAKEGTHWAVKKHPEQRVYPWNFEEVVDLEKSAERFMEQLTNTCTYLIGETVLPKDSVAYARFMVLNELNNVTIYGHRLSVDVKQQVFLELFCGKNRVTRKAFLEFLRKEGLIHKGEEEAVGGFDGEFKASLKVWNRLRAIFGEDLPDTEQMDQMILSVLLLKQEPEMLKSRITRLYPSITPSQLKSVCKLPCSGWGRFSREFLTGLKADVPQYGGSDWSILDALWNTDCNLMQLLSGDMPYQALIEAHNRELMGDVKLDYQTVSGLSAPPAVRRTVWQTLRIVQEITHIMGGAPKKIFVEMARGSDGSKQKVSRKKQLSDLYQKMGEEGAEWCEKLDQYEDSRLRQDKLYLYFTQMGRCMYTGEPIDLHALLNDAGNQIYDIDHIYPRSKVKDDSLDNRVLVKKTVNVDKGDKYPIQSEIRQAQTSWWRNLRKCGLISEIKLDRLTRSTGFSEDELAGFISRQLVETRQSTKLLAEILSKALPESRIVYVKAGNVSSFRQENNIVKVRDLNDLHHAKDAYLNIVVGNVYDVKFTANPKRFLRSGEPYSMKTDVLFGHTIRRGNQLAWTPDYLPEVKKTCRRNPILVTRMAVRRNSGRSGGLFDQNPVRGGTIPLKGDPRMQDTKRYGGYDKETGAYMFLVEHGEPGKRIRSMEPMYLRYAQRIQDNSDDLAIYCTEVLKLKDPNIIVPEIKFYTLMESSGFRFWLTGRGGDQILGIQGFQLVLDETSESYLKKVLKGCQKVMSAKGQIELEEKADRVTKEENKTLYDVLLEKMQLPIYRSRPASQVQTVSAGRECFAALTLTEQCVALSNLVQLFRGNGQADLTGIGGSKTAGSMKFSKKTGADFKIIYQSVTGFYSHEESFSIKRPAATKKAGQAKKKKDYKDDDDK

SEQ ID NO: 107 - protein, 1448 aa, synthetic construct
MAPKKKRKVAKYFLGLDIGTNSCGWAVTDEEYNLIRRKGKDLWGVRLFEGAVTAEERRQNRTNRRRLDRKKLELSWARDVFAEEIAKVDKDFLTRMKYSNLWAEDKIKMSNSLKSKDSLFHGQVDGRDYTDKDYYIDYPTIYHLRKELTQEPAKDIRLLYLAVHNIIKHRGHFLYGGNFGDNSNLLVSFNEALDCYKKIIDQEDCLLHVKKLEEGDIAEILDCIKSKSGMRLTKAKFNEIFDAKTKSQKMLVSAFVDGKINLEQLFETKLEEGKLDFNDEDIEIKINGLENVLSDEQVSLLYKIQEIYSLLQLKSILADHEYICEAMVESFEEHHRQLEQFKKFIKKYYQKEYFNIFRNPRDKDSDKNVGYAQYVNCNLTNGSKQVVDLNVSNRSKEEFYKYIKKILSFTPNDCQDLEQFENERNYYLSLIQEDRFLPKQRTKSNSVFPNKLYEKELKQILQISGKKFEFLNEIDKTCGLTNAQKLLQILTFRVPYFVGPIGQNSNGQNHGWAEKITNLDYKPWTLNKIVDFDMAEDAFIGKMTNKCTYLKDKDVLPKNSIIYSKYRVLNELNKLKINGNDISVELKQNLFNELFCNFAKVSSKDVKKFLIKEGLFSADEINDIQLSGIDREFANNFSSYSKLASNSLFGKDFIDEHLIEIEKIIKYHTVISDKNRLDKRLRREFSGIFNEEQFKILKGLNFKDWGSLSYEFLCGLKFVNRETGEITSILDEMWNTNQNLQQILNNGSYTLSECLTKSNEKSLKNLVYQDVENLYCSPAVKRGIWQSVKLIREIVEVMGEMPEKVFVEVTREDGEKGDSGRKSSRKEKLEKLYNSKDFKKNVFISSQEIAQLLKELNDKDVTSLRSEKLFLYFLQSGKCMYSGQTIDINDIYNDNLYDVDHIIPQSIIKDDSIDNKVLVKRQLNAQKLDTYPVPYEFISKQKGFWKVLLDNGFISKEKYDRLVRTSPLTEDDLGQFIARQLVETNQTVKAVIDFLKVSMEDDRKVVYNKAKLVSEFRQIFSITKCRDINDLHHAQDAYLNIVVGNIINNKFTDDPRNFYKQKKFMPLIYNKEEKITESNNIKKVFTGVVFSSASTRPVWSATRDINKIKKICQRTSPLISKMSFANFNGAFYKETVHKSNKNNKKTEASVSLKGDKSNPIFDTQKYGGYNNLNNAYFMLVESKDKKGKTIKTIEAVPILILIKNMGKPNLNENILKYISETRGLNDAKILIDKINFQSTFLIGRGRYVLGGKSDNVILLHNANQMFFDDECKKYIKAISKYFRLKADKIESSLEQDDEKIALSPASKKENKEIYLTKEDNLKLYEKFIEKLSCSTYEGMQLATVLLPKLKEKKELFISLSVQDQVQVLHEITKRCSCGAGFADLSKLKDGTSVGKISINKNITDKNIILIKNSVSGLFEQRIKLKRPAATKKAGQAKKKKDYKDDDDK

SEQ ID NO: 108 - protein, 1363 aa, synthetic construct
MAPKKKRKVKKYNIGLDIGTTSVGWAVVEKENFKVMKKGRKKMWGVRLFDEATSAAERRGYRNTRRRYDRRRKRIQLLQKEFQKEMNLVDPNFYQKLKEAFFHECDIFNKTTIISQEEKEQMKTYYKLYPTIYHLRNELVHTTEKIDIRLVYLAIHHIVKYRGNFLYEGAKFNTSQLQLNEKINELFHVIDITNGTIEHHSEMIELLDSLKLEEALLLENKNEQRIYIKEALQNYFSKNFISEFTKMILGDNFSVAKLFDVELDPDIKLNFKGSDYDEKFAQLEKEIGNQIDILKEMKSLYDILFLKKLLEGEDEGNISAIMVKRYQTHKQDLNLLKSVLKQKKETYKQVFKSNQKLCLYEQYCHNHITYDEFTKKILNFLEKEDISDNSILLKKRIETGKFLPRITNIENGKFPYQLNYSELISIIENQGIYYPFLKEKENNTYKLIQLLQFRIPYYVGPLNNTTNTLKKNSNAWAIKKENVACITPYNFKKVMDLDASAEEFILRMIGKCTYLLKEKALPEASILYSKFKVLNELKQIRINGRKLELEIQQKIYKDFFLKNSGNLTDNRFKTFLYQMPEMRMYDDLTITGYSADMKFANTMQSYIDFFGENGIFEGTSYDEKDAEQLISWITIFEDQEILKRKIEAHYSLNETKINCLLKKKYKGWSNLSKRLLITKYYQNSNAITKQSILDLMETTEENFMQILYNRKYKFQDMIAQINGNEMSQKLNYEVVSELATSPAVKKGIYQALLLVEEIISIMGYEPNQITIEMARGDEKKERKSDRKKWIENLFTKCKQQITNYNQLKKELDRFESIDSQKLFLYFIQEGKSLYSGTPLDIEKLNSYEIDHIIPRTLWKDDSIDNKALVLKKENQEKAAAFVLPSKFRNDAMRKWWDHLKLNGLISSKKYHNLCRSKYTIEDIEGFINRQLVETRQITKNVANIIQKYHPDSKLIYIPASLSHNYREKFELFKFREINNFHHAHDAYLAAVLGEYKVSYLKEAMDYEQLKELTTQWMNHKNYKELNYGYVINSLDNKFPRYDLNGEIVFHPIDFNQTVKNTLYQNDVIISKKTEMKTGKFYKETIHSKRAKGNKLSLKKGLDPKLYGGYQDIEVAYTILVYYQNQYKLVGIPILIYKQAQKNTDIIMEYVKEHLKLKENDSCTLIKDKIFFNTLFLYKGQYVYLRGYSTESKGCEIANATELKIPRKKMEQWKYTLNYVLNDKKVPNNLEELLTEDKIEAQMNEIIQWLLSKQEYYPLYTSAIEKIKTVFNEINLSFEEQKRVIKELFILYGTSRNANLSFIENGGLSDRIGRLSGKNVNHGIIFYRSISGLKERYYEFKRPAATKKAGQAKKKKDYKDDDDK

SEQ ID NO: 109 - protein, 1121 aa, synthetic construct
MAPKKKRKVKQLVLGLDIGITSVGYGIIDIENNEIVDCGVRLFKEGSAAENETRREKRGSRRLKSRKVNRIQDMENLLKELGIYENCNLIHNNPYDLRIKGLSEKLTNKELTRVCLHYAKRRGSSLDMVEDDETKAKELGETKKILQENDILLKQGYYVCQVQKMNEQKYGKIHGNYNNFRTSDYLKEAKQLLSIQGLKEENIEKILNIIQRKRQYYEGPGSLKSPTIYGRFIEEDGRIIKIDLIEKMRGHCSIYPEELRAPKMSYSAELFNFLNDLNNLKIDEEKITPEQKQEIISIIQTKKNITPLQLSKFLGVEIEKISGFRIDKKDKPILTEFKGFKIIAKVLEKNNEKELVKDVKFVDSISEILTRTKDIQERIESIEKLNDNLSKECIYSLANITGIRGYHSLSLKAIYEMNEELLNTEMNQMQILQSSKKLEQKINQKGKKNIQEDNTAILSPVAKRAIREAIKVVNAARKRYGEFDSIVVETTRDKNSKEQKKRIDDAQKYFKKRREEVDEVVNGRPLNAKTREKIRLYMDQDGKCAYSLEPIDLNLIMNDPTAYEIDHIIPISISLDDSFNNKVLVRRKANQDKGNETPYNAIKQGKIKNKNLKSVSIQEYQAYVLNLRKENKISNKKKEYLLSQKDYTKLDVRKEFVNRNLIDTSYANRVVFNTLEDYFKQNEIDTKVHTIRGAATSAFRKKVNLQKVREEDHSHHAIDALIVASIKKLNLLNKLLDVKNIKDVYDDETGEYLPMDDNSYFDPKYMNFINQLKDVKITKFSHKIDTKPNRQIADDTIYSTRIIEGEEKLIKKYGDIYDPKFDKLTNDILNESYQNKYLMAIHDSKTFDKFINIVQDHYNTYKDDSKIYTLDKGKIKLKGDNPLFLYKNEHGFVTKYSKKNNGPAITQMKYVDCTLGNRIDITSNYKIKDDKKVVLQQISPYRTDFYLDEDGHYQFVTVRYSNIKWKATQQSYIIDKEWYKNAKKQKGIQENAKFCFSMHHDELIGFIKEDGEKLIYNDEHNLINIMKEHNGKDYEILKFTATNNEGKNIVEVKPIYKYTSDRIKPLINKKIIKLAKFATDPLGNLYEVKDSKLKLELKRPAATKKAGQAKKKKDYKDDDDK

SEQ ID NO: 110 - protein, 1387 aa, synthetic construct
MAPKKKRKVEEKKKYNIGLDIGTSSVGWAVVESGTQKIIKKGTKKSRKSLWGVRMFEEASTAAERRLYRSSRRRYDRRRNRIKRLQNEFESEISKVDKDFFQKLRESKYHKNDEQNKKIVLSDYEKNKIKEYNENYKTIYHLRSRLIHDSSQEDIRLVYLAIHHIIKYRGNFLYDTKEFNVNHLNLVNSLKICFASLSDFFSNLNFSENYEEVIDFEKLANILMKSTKNDIRISIKQLLEGICENKKFSTEFGKLVVGNKFSLKNLFLLEELETDMTISFNGTDYEDKYNELEELLGDKIEVLNALKELYDIIFLKSLFKDSDTLLLSDLMVKRYNLHKEDLRFLKQMLRNTRDLYNQVFRTSKETCLYELYIHNQMTYEEFVNKLQKIMSKVFILNIDEQMEQKYKKEVQPRIENGGFLPKITDCDNGKYPYQLHKEELIKIIENQGKYYPFLLDKVNGEYKLLKLLEFNIPYYVGPLVTEDKSPFAWMERKKDGVKITPYNFDEVVDKEATAEKFIKRMISHCTYLLNEYALPNHSILYSKFKVMNELKQIKINNQKLDNHLTQKIITELFMKTNGSITDKRFKEYLYTLNEFDMFMGDIEIKGYSADHKFANNMQSYVDFFGENGIFNSTSYTVEDAEKIIEWITIFKEKDILEKKIRDAYPDLLDNQVKMALSRKYSGWGRLSRKLLTGLFIKDKKSDVPKNIMDFMQETNENFMQIINNEHYKFQKLIDENNLIKETKKINYDLVKDLVTSPSTKKAIYQSLKIIEELVNYMGYEPENIMIEMARGGGKKERTIDRKKYIETLYKNLESNKATTYFTNFEVTKEELKKIEKIDSQKLFLYFIQEGKCLYSGEPINIEDLSNCEIDHILPRTLIKDDSIDNKALVYRNCNQKKAASFVLPPEYRNNHRKKWWNHLKENGLMTEKKFYRLTREFYTDEDIQNFINRQLVETRQITKHVANIIKSLYKKTKVIYLKAELSHHYREKFALFKFREINDYHHAHDAYLAAVLGEYKEKYLKRNVNFEMIKEMNYQLRMSGDRNQLKYGYFINCLDKNVNDIVIEMCKSMIDDSTGELLFDVVEFNKRIEDALYRNDILVTRKTEIRNGKFFKETIYPKKVGRIKIKENMPTHLYGGYSNMQTAYLVLIKYGKKVKLIGIPVDIHLKSRKDSTIKFNFIKEHLDVDTFQILKDHIPYESFIDYKGQKVYIKGYSVANKNCELCNARQLKIPREKMKNWRYVLNKVLNKVDIPWENDDPILSDDEIIKVMFEIIMYLYQQKENYPLFINEINRIEEKIGLENLDYEALAKIISQLFTIYHCDSIHGNLKEFGLKDRIGRLCGKNIESGAIISRSITGIREDQYEFKRPAATKKAGQAKKKKDYKDDDDK

SEQ ID NO: 111 - protein, 1453 aa, synthetic construct
MAPKKKRKVDKKPPYYIGLDCGTNSVGWAVSDKNYHLLKGTHHIKTEKGTKTKKQTLWGFRLFEEAETAAERRIHRSARRRAERAKNRLKLLRMLFHDEIVQVDPEFYQRLKESFYLLDDKKLQKNSKNTLFNDSNLTDKDFHKKYPTIWHLRQAIINAKDDEAFDIRLYFLAIQHILKHRGHFLMEGEINSDGDVDFESIFENFRCEAERVGYNIADVPAEVKELLMQKMSKTDKKKSLKDILYIEGDELDDDVPKGQLELAGLLVGSKVDLKKIFSINDDEKFPYSFSEGAFEDKLPDIEMTVGSENLDLIFAAKKIYDYVTLDNLLAGNKLISDAMVANYNQHSNDLKKLKQVFRPHREVYDKLFKTKLYNEKFPSYDAYISKAYTEDKSGRKSSKNIGQEDFNKHLHKLLEEIKTKTKPELDSLVDELLDRTDTSEKSVSPLLLPKQRGQAKGTIPQQLHGKELKYILQKLQKDYPSFAEVTPGEDESCNTKAKKIIKIHEFRIPYYCGPIVKRKFDDDGKQVANGKSQFSWADEEIAELVYPWNFDKLIKKEQRANNFIRRMTNECTHLVGEDVLPKCSLIYQKYMILNELNNLKINGYRIDNQLKQQIFERGYKNNEIKGNITLKKLEKWCKDNALISINDEMSGTSEVKTLPKYQTYQDFSRILGTDFAHKYSANKLEKVVESITVLGDEKSMLKQSIQEILNCDAKTANSLSKLSYKDWGRMSAKFLNGITVNDRTILDYLWEDNKNLMELLGQEVGFGKIVEEYNKSKRPVTNRITYHDVESLYCSPAVKRSVWQTIRIVDELVKNLQYAPEKIFLEVTRGEDKNAKGKYTLARRKDLETKLKAVKTDDARAILKELDGYEDRDLQSKKLFLYFSQMGKCAYSGEPISLEELNNSQLYDIDHIYPRSKTKDDSITRNLVLVKANLNREKTNNYPISDTIRNKMHGIWSVWYHQGLITKEKYERLTRATPLTNDELGSFIARQLVETSQSVKAIRDLLKQAYPKTKIVMVKAGQVSNFRHLMSRDKKDRDGNIYEPGKPEFIKVREINDLHHAKDAYLNIVVGNVMNETFTDNPNEWIKRRAGKEYSINPERIFRASKTYRKANGEETSYPEVNGWNFAESIQAVSNTMRRNDVIWTRMNYIESGEISDLQLVGKSNKADGLLRIKQQERLDPKKYGGYNSLKGAHFALIECKDKKGNLQRCIVQIPIIAKNNIENYIAENYTDAQVILPIIKYKSLLKADGLLLTISNKDSDLKNGYQHAVQAKFQQSISPYLKTICSICAKDKLARNNYQISTEDNVNVEHNLQLFDEFCDKMKIYSGYPELAGGIEKIMLSRTTFSELDLKQQCLTLGQMMFIFACKAQNAKLNTIGCGDSVGRIRISNNKLFSYNNLHLINQSPTGLYEEVIDLKTVRPKVNKQDREKRPAATKKAGQAKKKKDYKDDDDK

SEQ ID NO: 112 - protein, 1411 aa, synthetic construct
MAPKKKRKVVLRQLHNTMYRRYCQLNSSEKVKKYNIGLDIGTTTVGWAVVEENTQKVIKKGEARKALWGVSLFEEAKTAEKTRSFRGTRRRYDRRRERINLLQSEFLEEINKVDQNFFQKLKESKYQEDDTVNKSIILSAAEKKKAKEYNNKYKTIFHLRSRLIHDSSKEDIRLVYLAIHHMIKYRGNFLYNVENLNTNKLDLTDRLKSAFDSLMDLASNLNIMENYEKVVSIEEITKAIMNPSKNDIKVKVKELLVNLSDNKNFGSEFGKLVVGNKFSLKKLFMLEELEKDISISFDGTDFEDKYDELENTLGDAIEVISVLKELYDTIFLKKLFKGKATSSLSDLMVERYNVHKEDLQFLKQLFDKDRKLYNQLFRTKEKACIYEQYIHNQLTYEDFIKGLKRLLENISDISINDDLRDKYTREIQPRMDNGEFLPRITDLENGKYPYQLNKDELEKIIENQGKYYPFLKDKINDEYKIVKLLKFRIPYYVGPLVSSDKSRFAWMERKIDKVKITPYNFDEVIDKETTAEKFIKRMVSHCTYLLNEFALPNHSILYSKYKVMNELKQIRINGTKLSDLNTKLPNKIMEELFMKTNGSITDKKFKEYLYYSNELTMYENDLIITGYSADGKFANNMQSYVDFFGKKGIFENTSYNENDADEIIEWITIFEDRDILEKKVRKNYSLLSDTQVKKILSRKYSGWGSLSKKLLTELTIKDKKSNISKNIMTLMEETDENFMQIINNDEYDFQKLIKENNVLKDTNKINYDLVKDLATSPATKKGIYQALKVIEEIIDYIGYEPENIMIEMARGEDKKKARKDDKKKYLQKLYQTMKEENRIDDFDNYDAMSKKLNKVDNIDSEKLFLYFIQEGKCLYSGEPLNIEDLNSAEYEVDHILPRTLIKDDSIDNKALVYRKYNQKKAASFVLPSEYRTGYMKKWWSHLKKNGLISAKKFDRLIRDSYKDEDIQGFINRQLVETRQITKHVANIISNFYKKTNVIYLKANLSHNYRERYELFKFREINDYHHAHDAYLAAVLGEYKEKFMKKDINFVMVKEMNDRLRSLGNYKQLRYGFVINSLDEQVSDIVTEISKSMINKDTGEVLFDAKRFNKQVEKTLYRNDILVSRKTEIRTGKLYKETIYPKGIGTIPVKENMPTNLYGGYSNVETSYLVLVRYGKKKKLIGIPLEIALKSKKDINKKYSFIKEQLNDIDDIEVIKDFIPYETLINYKGQKVHIKGYSISHKNCEVSNALQLKLPSNKAKEWKYVLNKVLNKKNIPIVNDIPIVSDELLNETMKKIILYLYEQKKNYPLFESEITKIEEKINFNEMNIDELEKIIVQLFTIYHCNSVNGNLKDFGLGDRIGRLFSKTIDSGIIISTSITGIKESKYEFKRPAATKKAGQAKKKKDYKDDDDK

SEQ ID NO: 113 - protein, 1405 aa, synthetic construct
MAPKKKRKVMYYGGIDLGTSSVGWALTDEHYRLIHKKGKDLWGVRLFDEAESAKERRSSRVSRRRRARETARIGMLREYFSAEIEQTDPGFYQRLEESKYHREDKRTKEKYAIFADGDFTDREYYKTYPTIFHLRKELLESTEWHDVRLVYLAVLNLFKRRGHFLNEYLGETDKEGGMDELYRTFCDSLPEELELKFPELCAAAADFEQILGNRDLSRSGRAEELLAFLGMTKKENKKEFELVKMFCGLSGKLAVIFGKESLGSEFEKKELSFRSSAYEETMTEIGDILPQEYLDVIEAAKNIHDKGLLGDILKGETYLSIARVASYKKHKADLTLLKKTLKKYCKREEYDAYFRVMADDNYSGYVGSVNSEKERSGKDGLQRGKFRRNRNAKKENYKNFWKKTKELLNQMPEEDEDVRYLKQELEKETFLPKQLTSENGVIPNQVHLSELKKILSNAEGYLPFLLEKDESGLTVSERIVRLFQFQIPYYIGPLYIREGEEGRKWVKRKEGGKVLPWNMEEKVDLAKTREAFITGMVRRCTYMEGKYVLPKNALLYEAFMALNELNNVRIHGEKLPVALKQQIYRELFMTGKRITHKRFWEYLVADGQLSKEDTDAISGIDGDFKQSLVSYGRFYSVFGEELKNRDIWDMAEQIIFWGTVYSNDKKLMKELITETFGEKAQKTLLSEAQMKRISGYKWKDWGRLSAAFLTLRGCSKDPNEGGVIYSLIEALWETDCNLMELLSDRFTFMDNLEERTKKNEKLLGEFSYQDLEDSYLSAPVKRMTWQTILILKELYGVMGEPPKKLFLEMPREHGEKGKRTVSRKKKLEALYKGCKEDGRNWEQEIKGLTEDQLRSRKLYLYYTQMGKCMYTGRPIDLETLLRENSRYDIDHIYPRHFIKDDSIENNLVLVEKESNGHKKDHYPIEASIRQERMGHWKFLKEKGLITEEKYKRLTRSWEFTEEELAAFINRQIVETGQAAKYTAQLLKRLLPETEIVYVKAGNVSDFRNKRDLLKSRVVNDFHHAHDAYLNIVVGNTYDTKFTKSPIHFIWNYKRDPEKYRYHMDRMFDFDVIRDGVTAWKAGKDGTIVTVEKMMKKNTPLLTKRAYEAHGGIAEQTIYSAKEAKAESYIPVKSGDERLGDVTKYGGFSSVAGAYYFLAEHGKEGKRKRTLEQMPIYLKERLEQDEEALKEYCIKKLGLVNPDIRIKKIPFRSFVKRNGYYMYLGGKTNTQIWIENGVSLCLSRQWVNYIKRMENFNSNEKEEDNRADKKKEITKQRNEELYQELLTKHRDTIYAKKPNPVYSKLSAKQNDFKELTLREQVRVLLELLKATQCVNLGVKAAEIGLKVSPLNIGKGIGNEEEFLLIYQSVTGIYTRTIDLKTVKRPAATKKAGQAKKKKDYKDDDDK

SEQ ID NO: 114 - protein, 1400 aa, synthetic construct
MAPKKKRKVDKFYLGLDIGTNSVGIACTDENYNLLRAKGKDLWAVRLFDEAQTAATRRTFRVARRRLQRRAWRIDILQEIFEPQVDDKLFFKRLNNSGFVFEDKDAQLQSPYSLFADKAFTDKDFYKKYKTIYHLRRALAHGDGKFDIRLYYLAIHHIVKYRGHFLFDGLSVGEVRDVKRLFDRLNEASSQVFGDDAPVWNSEVADKFREIALCRDKALNDKKKACFDLFECADSVRKKAAVTLMLGGKEKPNNVYASGEYKEEKSFSFGELTDEEYDAKREIFGDDFEYLDALHGIYNYLMFERVLSGHDSVSDSMIALYDKHKSDLRKLKNLIRDGLSHDEYVAMFKSIDEKHNYVNYIGYTNRGKKKVNVKKCKPDEFFAYVKKFLIERREVIAGKGEYCVNVCKEILVEIDNKTFMPKILNADNGLFPYQINKEELSRILNNLCRDYPQFGIADSDGKSAADKIISLFEFKIPYFVGPLNTYHSQFGGNSWAVRKQDGKILPWNIEEKIDYEASAEKFMRRMTGKCSYLHGEEVLPRCSIYYQAFDVLNQLNKLKFNNQPISVQQKQNIFNDLFLRVRRVTDKTIINYLVKCGQIPASEAEQTILSGKDGDFKASMSSYITLCQILGENFVKNHLDICEDIILLHSLHTDKKTVGRIIEERYGNYNEIKIALSRLKGITSFKDFGRLSRKFLCELSGGTLPTGAPRTILDELYETNNNLNELLYGEQYCFSESIAQENGEIDGNITYETLEDMYISPQVRRGVWQALKMTDECVRTVGRLPDKIFIEVTRGGGNKGERTVSRQKKLAALYNSARQAEYDIAELTKELNRQSDMELRKERLYLYFLQLGRCAYSDEPISLDQLNSDMYDVDHIVPRALTKDDSIDNKVLVKSELNRKKKDIYPVCAALPSEFERAKRLWKTLNSVSYQNEKLMSDKKYAALTRVAPLTDDDLRDFINRQIVVAGQSVKAVADLLKRKYGTEVKIVYSKASNVDDFKQRFGIIKCRETNDLHHARDAYLNIVVGNVYDTKFSSVATMRYEKDGRSLEYNFDRLYNKPISGAWNGDGSISHVKSVAAKHSMCVTRYSYTGKGELYNATVYGKDKGLIARKQSGPYSDTEKYGGYNSLTTGYFAVIQSKDKKGNQIKTIEAIPVLVAETEKTQKGAFMRYLTDVRGLKEPKIILDKLKIKSLLKYNGSYLWIAGKSNNRIIYNNAMQWYADDKIDAYVKALTKLCSYKAKNMLSEDELKRAEYYINTNRKGDKKSVVNADENLQLYDAVTEQLAKPFYGGASGFTCVRKKMIAKRAEFQKLSVLEQAQTLLGCIHVLQCNGSDADLSKIGESSHAGKLVINNDITDAEVFVINLSECGFTEKRQKLKRPAATKKAGQAKKKKDYKDDDDK

SEQ ID NO: 115 - protein, 1370 aa, synthetic construct
MAPKKKRKVEKFYLGMDIGTNSVGIACTDEKYRLLRAKGKDCWAVRLFDESKTAETRRMFRGARRRLERRKQRLGFLQALFAPFIDDETFFIRLNNSQYYPEDKSELLGKNKNNLFADKNYTDKDYHKDFPTVYHLRHKLQTERMSDLRLYYIALHHILKYRGHFLFEGGMNDVRDVGRLFTELNEVCADLYSDAENIPYFDPSYTQEAKECLMRSDMGIRDKQPHLESLFGKDAIIREIIKGICGASISPKTLLGDSYKEEKAFSFKKITDETFDAMQSTYGDDFALLEKMRAIYSYIVFEKLLEGHPNVSSAMIKLYEDHKRDLCQLKEFLRKNAPDEVYKSFFKSDKEIANYVNYVGYTKRGGKKVKVKLCDDESFFTALKKMLLQLDGVKDTSILDGIIQKIDNGTFLPKILHSDNGLFPHQVNEDELVKIISNMVDAHPQTKEMADKILPLFLFKIPYYVGPLTGKNSWAVRSSEKITPWNFDEVVDKAQSNERFMRRMTNKCTYLHCEDVLPQASILYQKYNVLNQINKLKIDDVPIPAFLKQQLFEELFLRKKSVTDKAIINFLVRNGQLDDCRKNIAKITGKDGDIKASMSSYIRLKEILGDFVDEDLAKGGEICENIILWHTLNTDKNIVCDLILKNYGDISVIKDHIKQLKGLVFQKFGRFSKKFLTGIDAAQSNSGARISILDILYETNQNLNEILFNEKYNFEEAIAKENGTTSSDITYEDVENLYVSPAARRGIWQSLQMSEEYVRAIGKIPDKIFIECTREDGQKGDKGRKSSRKTRLLDCYKSIKKYKEYEDIFNELDNSGITDMRLRQERLYLYFRQLGRCMYTGERIDLEDLATNRYDVDHILPRCYIKDDSLDNKVLVLRSKNAEKRDRYPLPHGFSNQQVFWKLLLDKDLIKDVTYKRLTRVEPLSEDDYNDFINRQKVITDQTVKAVAELLKRKYPESKIVYSKAKNVSDFRQKFDIYKCRNTNDLHHARDAYLNVVVGNVFDTCFSTPMSLFYNKNDEWRTYNLKTMFTRNVAGAWDDNSISTVKTICAKNSMAVTRYAYREKGEFYNQTVYARDDKGITLPRKGKGVLADARRYGGYKGQSTAYFAIIQSKDKRGKVIRTIEAVPVLLHEQSKNDFKILKQYFENSGLREVEILVPEVKNKQLISYNGMPLYMTGVSGSNILCWNGVQFFSDSKIDEYVKALAEFYERYGRELDSKTDEFYIIKTNRMGEVKLKIDRRQNESLYNMLSSKLEGKIYSGMNYCATFRKILTDGAEKFNKLTVANQVKVLLQILNFFECNALRSDLSLIGGGAIVGTLKFNKNITDVDFRLIYQSPCGLTKRERKIKRPAATKKAGQAKKKKDYKDDDDK

SEQ ID NO: 116 - protein, 1382 aa, synthetic construct
MAPKKKRKVIKYYVGIDIGTDSVGIVCTDEEYRLLRAKGKVLWAVRLFDEAKTAKERRNQRTARRRLQRRAQRIDLLQELFYPHISDKLFFARLNNSGFLYEDKDEKLQSPYSLFADENYTDKEFYKEFPTVFHLRRALIAGEKKYDLRLYYLAIHHIIKYRGHFLFEGQEMSEIRDIKRLFDNLNETADNTFDEGAPIFLAEKAEEFKKTAMSRMGVNDKVKECCALFGVGKDERKKEIIKLLSGGTGKTCVIFDNEEYRDEKICFKGLDSETFEAKQTVFGDDFDYLSKIKSIYDYIVFEHILQGNAYISDSMTKLYDKHKSDLRKLKDFIVKNCSHGDYIKIFKSTEEKSNYVNYIGYTKKGKSKVNVKKCKYDAFKKYLQNFLDKTPLSEEQESVKKDIIEELKNDTFLPKILNADNGLFPYQINLSELDKISENLCRDYPEFGIKTDGNSIADKIRSIHTFRIPYYVGPLNTSAGINAWAVRKKDGRITPWNFKDMIDEAESNEKFMRRMTNKCTYLYGEDILPKCSILYQKFCVLNELNNLRINEQKLSVQLKQDIFNDLFLKDKRITYKKIREYLVNKGYFAKNEETGINLSGTDGGFKSSMSSYIALKSILGNFVDSHSDVCEQIILWHTLNTNKDIVAELISKNFGSYKEVASNIKALKGLSFKDFGKLSKRFLCDIKGGVDEETGAVYNMIETLYNTDKNLNQILYYDKYTFLQRIEEENGDADDEVTSKTLTDMGLPPQVKRGVWQALQMVDEYVKALGCPPAKIFVEVTRGDESRGKKKGVRSVPRKAQLQNLYKEVKDIDELKKELNREEVTDSKLREERLYLYFRQLGKCAYSGERIRLEDLGSNQYDVDHILPQSLTKDDSLDNKVLVLRACNARKSDTFPVPAEYQAKMRKDWKLWKEKGLISDKKYSLLTRTEPLNDNDYRDFINRQIVTTGQMSKAVAELLKRKYGEETKIVYSKGINVADFKNKYGIVKCRETNDLHHARDAYLNVVVGNVYDTRFSGVHRMFAKREDDSWRQYNLKKLFDRPVGGAWNPDSSIETVKNTIRQSGISVTRYAFTENGAFYDATVYECGDTGIDAPRKENLPTEKYGGFKSLSTAYFAIVRSVDKKGKSIKTIERVPVLTVYKQKTDKDAFINYLTNRVGLKEPQILVEKVKIKSLMEVNGTPVWIAGVSKKDILIHNAVQWYTDAETDKYVKGLVKLEDMKKSGKLSDKELEEKEFVLHTNRFNENKLVVEPKLNIDLYNRIISQLEKPIYGGISAFATFRENLRKGSEKFKELRCFDQAYVLLQCIKFLKCNAEIADLSLIGAGEKSGKLTINKNITGKDIVIVHTSPCGLIERRKKVKRPAATKKAGQAKKKKDYKDDDDK

SEQ ID NO: 117 - protein, 1387 aa, synthetic construct
MAPKKKRKVGNTRGKDKYYLGLDIGTTSVGWAVTDDRYEIIKRHGKALWGIRLFEQANTAEERRAFRTARRRTERRKNRISLLQQLFSEEIAAKDPGFFVRMKESKYIPEDKRDLEGKRPELPYTLFADQEFTDVEFHKQFPTIYHLRYTLITQMDEKPDIRLLYLALHHILKHRGHFLFEGKEISEGMNFLAAVEVFLDCLEENGIELSEFQQEDKIRKLEEILTSSDSSRTEKKKQLCGLFAGEDKQKMALVGLIAGCKVKLSVLFDDRALDEEERSEISFSDDNYEEYISQVEEVLGDRFLLILSAKAIFDWSILSDILGTCSYLSEAKIQSFEKHKQDLIKLKNLLRKDRACYRKVFGEPGKTANYSAYVGMVKKNGKKQPINKNCSREDFYNFLKKTLQDIPCAETDRKVRDEMLEEIEKGTLFPKQILRDNAVIPYQLHEKELNKILENAVRFYPFLEKIDEDGYSVSQKIKEIFRFRIPYFVGPINTYHKEKGGNSWAVRIGNNTDKIYPWNFSKKIDEEQSAERFIKRMTNKCTYLLGEDVLPKESLLYAKFNVLNELNNLRIDGELVSVEMKKKIYHDVFKRHKRVTGKRVKDYLIREGLITKEQELSGFDQNFKSSLKAYMDMKQITTGISLTEQQQEDIILDITLFADSPKMLKRRIKQKYPQLSDKQVTQLSEKKYSGWGRLSRAFLEEVEAVNPETGVAMNLITALWETNDNLMRLLSKKYSYAEEIEKRNAWGDSESEISYQTVQDLYVSPAVRRPIWQALKIVKEIEHIMGAAPERIFVEMAREPGKKGERKISRKSRLQELYRFCKKEASELYDSLSQKDENELRSNKLYLYYTQMGRCMYSNEVIDLEELFTNRYDIDHIYPASKVMDDSLDNRVLVKSERNRSKSDTFPVPESYVKQAGDLWRTLSEKGLISKEKYHRLTRRDSFSTDELAGFIARQLVETRQSTKAVTQILNKAYPKTEIVYAKAKAVSDFRQQFDLIKVRDLNDHHHAKDAYLNIVVGNTYYVKFTKDASWFVKNNPGRTYNLKKMFENDVKRGDEIAWTSGGKGTIHTVKKWMRKNNILFTRKAYEVKGGLFDQQLVKKGKGQVPVKGKAEDTRLASIEKYGGYNKASGAYFILVQSDDKKGNPMISFKFVPVYLAQKLEESQENMLQYCREELGLINPRVLLPKIKMGALIEVDGFRMHLSGRTNNRLLFKGANQFVVSERIQKTIKKVGKVCADHAINKNVAVSDRMGLNEEDLKRVYDTFHDKLKNSIYGNQLSAQIDTLENGEDKFVRLSKVEQCLVLNELLHLFQCRSVLSDLTLIGGPKRAGTILLNSNISKLEHIFLINQSITGFYEQVIDLKALKRPAATKKAGQAKKKKDYKDDDDK

SEQ ID NO: 118 - protein, 1389 aa, synthetic construct
MAPKKKRKVEKFYLGLDVGTDSVGIACTNEDYELLRAKGKDLWAVRLFEEAKTAAERRSKRTARRRLQRRAWRVDLLQELFEPYMSDSLFFPRLNNSGFVYEDKDARLGSPYSLFADKNYTDKTFYKEFPTIYHLRKALVYGDKKYDLRLYYLAVHHIVKYRGHFLFEGQSMSDIHDFRVLLDKLNQAAEESFFENTPIISAEKSDELKEIALNKSLRLNDKKKKCRSLLNAMKSPLKDIVTLMLGGSAKPCDIFDNDEYKQLKSISFKGMTEDEFSAYEDTFGDDFAYLQALKKIYDYIVFEQTLDGNDYISEAMIKIYDKHASDLRRLKKFLAENCPHETYLKVFKSVSEKNNYAAYIGYTKVGKKKVKLKKCTDKAEFDKFLKKIVSEVKVSDGDTEKEKLLSEIENGDFLPKILNADNGTVPYQINGVELNRILENLCRDYPDFASAVDGGLSIANKIKSIFEFRIPYYVGPLNTYHSKDGDKGNSWAIRRSEGRILPWNFDEKIDRAKSNESFMRRMTNKCTYLYCENTLPKCSILYQKFNTLNQLNNLKIDEQPISVELKQAIYNDLFLKDKRVTKNRIRKYIVDRGWAPSSRESEISLSGFDGEINVSMSSYIMLKNILGDFVDENTDICEDIILWHTLNTDKGIVENLIKSEYGHIGKIAENLKRLKGITSFKDFGKLSKKFLSEIKGAYRETGEVATVISMLYETNLNLNRILWDKRFTFMEAIDAENNVSSEDIAYGALEDMGLNPQVRRGVWQALKMTDECISAVDRAPDKIFVEVTRGCGEKGKRTESRKMKIEKLYETAHDVDELLSELKTRSESDLRQERLYLYFLQLGKCAYSGRQISLDDLNGNTYDVDHIVPQSLAKDDSIDNKVLVYRECNAKKTNIYPVPEQFRSMRKMWDRLKAQGLMSAKKYSLLTRTEPLAESDYNDFISRQLVVTGQTAKAVAELLKRKYENSGTKIVYSKGSNVSDFKSKYDIVKCRETNDLHHARDAYLNIVVGNVFDTRYSEAWFKSRDTYDKWRNYDRTKIFDREIDGAWHGQDTLVKVKATVGKCSIGVTRYAFTGKGKFYDETVYGKDGGAQLPRKEGKAGSPSPYADVEKYGGFKSPFTAYFVVVKSVDKKGNPIKTLEAIPVIVDYKSKNDSHAVMNYLCNVRRLKDPTVLVEKIKTHTLLEINGTPAWIAGITGSQILLHNAVQWYTSSETDRYVKALAKLDEADKSKRISDEERNRAEFEMSTNRFKEVKCAVNAINNLKLYDEIIERLGRKIYGGLSSVRTFRGNLSKSREKFVALSVIDQAKVLLQCVKFMKCNAEAADLSLVGCGKRCGILLINQNITDMNITVVHTSECGLTERRIKIKRPAATKKAGQAKKKKDYKDDDDK

SEQ ID NO: 119 - protein, 1403 aa, synthetic construct
MAPKKKRKVIDNLCIMVEIAQIKWYNMVKCNVIQWGKVIQMKKDYYLGLDLGTGSLGWAVTDAQYEILRKHGNALWGVRLFDNANTAEERRLFRTARRRLDRRNQRIKLLQEIFAEEINKVDEGFYLRMKESRYVPADKLDVKKKCPELPYALFVDIDYTDIDYHKQFPTIYHLRRWLMTTEETPDVRLVYLALHHLMKHRGHFLFTGNIENIKEFNGTFRQFIKGLQDEELDFALDITDDKTVDVESILKDSRLTKTTKKAKLIKLLGAQTACEKAALGLICGGKVSLRDIFGNKELDNCERPKISFSEAGYEEYANVVEADLGEQFVIIERAKAVYDWTILADTLKSYTSISEAKAASYEKHKNDLIYLKKLVKENLGKDSYRTIFVKTNEKLTNYSAYIGMTKVNGKKCEMVGKQCSREDFYAFLRKEVMNKIADEKKTEYLRSEMEKGTFLPKQVTKDNGVIPYQVHLYELREIINNLKERVPVLKENEEKIELLFTFRVPYYVGPLNGIKKGEDTTNWVIKRKQERIFPWNFEEVVDEEASAERFIRRMTNKCTYLMHEDVLPKNSMLYCKFMVLNELNNLRIDAEPISVALKQQIYERLFQRYRKVTQKKLKAYLLQEGLIDRNAVITGIDGDFKSSLRAYHDFKEKLTGCALSQDEKENIILNITLFGEDKKLLSKRLAKMYPNLSMAQRKGLCTLSYTGWGRLSKEFLESITAVSPETGENMSIIQFLWETNENLMQLLSEKYDFAKKIEAENVNEEIRNFSYNLLEQLRVSPAVKRQIWQTLQIIKELNKVMEQPPKKIFVEMAREKAESKRMESRKSKLLDLYKACKNEERNWIDALGNTEEHQLRSDKLYLYYSQKGRCMYSGEIIRLEDLWDNNQYDIDHIYPQSKVMDDSLDNRVLVKKTYNAEKTDVYPIAADVRKKMQSFWKALWEGGFISKEKYERLSRCTEFEASELAGFIARQLVETRQSTKAVASILKQVFPETEVVYVKAKIVSQFRQDFGMIKVREMNDFHHAKDAYLNIVAGNVYHTKFNGNATWYIKEHPGRSYNLKKMFTSDKDIGRGGEIAWKAGENGTIRTIRKYVDKNNILVTRRSYEMGGGFFDQQLMKKGLGQIPIKSSNERLCNIKKYGGYNKAAGTYFMLIESEDKKGNKIRTLEYVPLYCKKQIEQSERDALCYFAEDRGLKNPRMILNKIKIDTLFKVDGFYMWLSGRTGNQLLFKGAVQLLLTSCDERTLKKVIKFVQRKKENKNTVIVEQDMIFEEDVLHLYDTFLSKLGGTVYHSRLSAQEKTLREKRDAFNELCKEDQCIVLYEILHMFQCQSGAADLSMIGGPKKAGILVLNSNITGCKQISIVNQSPTGIYQQEIDLKTVKRPAATKKAGQAKKKKDYKDDDDK

SEQ ID NO: 120 - protein, 1148 aa, synthetic construct
MAPKKKRKVMEKTFQNKERQVKMGVRFGLDIGVASVGWAVVNDNYEVEEAGANLFTSADANQNVERRSFRQIKRLHRRRRNRISDFKKLWHSMGLEIPATNINNVLGLRVKGLNNRLSEEEIFYVLRNELLHRGISYLDDAIDSSTSLQSDYAKGISENQKELDSGSFPCEIQVKRLEKHGRYHGNISIGQDDEKVILSNVFTTSAYKKEILAILEQQKKFHKFLTDSFCEKYIEIFLRKRKYYTGPGNAKSRTDYGKYTTKINKETGEYITEKNIFEKLIGKCSVYKNLERAAGATYTAQEFNLLNDLNNISVNGRKLSKEEKEAVINETKTSNSFNIRKILKKATGEDIETLTGARLDKNEKEDFHKFAQYNLMRKEFEKNGFDITALSRENLDKIGRVLTLNTEKEAILNGFKLEGLSLPEEMADCLVCLRKQKGSFFSKWQSFSLEIMLKLIPGLYEQPKNQMELLSDMGVFKTSKDIFKNCNNIPASAILENIYNPVVSRSIRVTVQVVNALLKKYGYPEQIIVEMPRDKNEEDMKKRIADGQKKNQKELDSIIKKIDSEYGIKITEQDFFQHKKLVLKLKLWNEQGGKCLYSGKKIDIHDLLYNPSIFEVDHIIPKSISFDDSRSNKVLVYSTENQKKGNTTPYIYLKDLNGNWGYKEYFSYVCQLRKNNLITKRKMENLLFTEDITKIEVLKGFINRNINDTRYASRVVLNTLQGYFKAKEAPTKIKVVRGSFTHQFRNKLYLEKDRKETYAHHAVDAMIMCYSQMGFDKYHKLQSEIIDFETGEILDIKRWKEEFNEKTYNELIYQNKMIQIRANIKKAEKQVKFWHKRDSKPNRGLCNQTIRGTRNDNGTIKKVNKLDIYDPSGVVTLKKMISQGKENCFLMYQHDKKTWEDMLQIMEEYKEAKNPFTEYENETGDYLRKYSKKHNGPRITKLKYLDGEVRSCIDISHKYGFEKGSKKVILENSNPYRMDVYYNTKDQKYYLIGIKYCDLKFCKDGYIIDEETYNRILVSEKMLKPGQTRNNLEALGYKFMLSFYKNEIIQYEKNGEHYTERFLSRTMPKARNYIETKPVDAPNFEKRNVIGLAKTTSIKKVRLDILGNQYYSTSEKFKKIVDTIKRPAATKKAGQAKKKKDYKDDDDK

SEQ ID NO: 121 - protein, 1188 aa, synthetic construct
MAPKKKRKVMDKNDFKKTKYHLGLDLGVASLGWAVIGFDKEKDSKYLHDFGVRIWKQPVNRNGKSLTLIRRHQRSVRRLVRRRQHRISRLLNFLVSIKILEKKEDYYSWIIYKSEKEKEEKKPLNLKLKGLAGKKLQALELVTCLVNYAKQRGYSELFTTLQENKNLEDEFIYDETKIDKKLQEIKNWFQKHENISEKKDKDNATKKLNTQKYLLGMKNAMSCENKEKFPSEVIKDWKDNKTNKLFFRKSWQKEITELLSKQFSFHSQLNEKNRDRVLLIIFSQRYSEDGPEKNSPYIHKMFHNKMALSPFSSEEKKTTQHYTFWVLYKFIKIISLALFERVTSDNDEDKTVDKFNLQKLLPNWTEFAESLIYEFLKLNKLSLSKSREILENFIEKKLQKHISDDVIQEIKNKLKNFWTERKNDFTQFKLFEAFKKIIFGTKITKKALLKEKNLMNSIAYKMWLNFTLKKRQEEFEKMKKDNSRTTEEIDKLNKMGKSLIESQYSVPKAPFKQHMVAVINNFVNNDRFCDVNPYIYEEKESRKLISVSAEKLRKHKIFSKFLSEHIEYRVDNPVAFRSINQVRIVLKKLFAKYKNFDNITLEIGRDLNTKKEQETIRKRQAENNKQNKKIEKEIKRELGYDSVNSTKRLRYKLWKEQNFDCLYCNQKIEKEKIFSIYTHIDHIIPRTTTVNNSHDNLVLCCTDCNLAKGTKLIRIWKDNKFQNWIQSIEKKLKLNKKKIYHLKLQKEDLNNFLNRDAVNNSIIGKFFKNYIEVNLASKNMNTPVKVMSGRITRKIRDKLFRWTSWGIEKDELRKITRFHHAIDAICIALMDKQKIISFITDWININRYTKFNFEKNEKNNDIDILKPKWKHSINNFQYFTAKEKNVINKIFQSGTKVDNRLLFELFKINSNFDTEVENRMPVLLNKTLVEKNGKKKMEIEVSDVLDENKYLEKIKEYGYQGDIHYPFISKQIIKKIPKTLSGEQPIKLKGKEDKDEYLSNESQTNYWDARKYYGFNLEGQWLLNKNFWKKKRQTRYCEKCNKVKIGKATFWIDENKNEQFICKKCFKKENFSSVWNKTKFITQNETLEWKINEHYYYYSFLGKHGNAIDLESLGLKNFRFDPKSKNFKKNSPEKGFSAFLKKFKNNEIKVLNISLLGKKQTRSRKRPAATKKAGQAKKKKDYKDDDDK

SEQ ID NO: 122 - protein, 1388 aa, synthetic construct
MAPKKKRKVMYYGGIDLGTSSVGWALTDTNYRLIRKKGKDLWGVRLFDEVKSAQERRSNRTARRRRARETARIGLLKSYFADEIDKVDTGFYQRLEESKYHKEDKKTGNRFAVFADREFTDREYYETFPTVFHLRKELLESDAPFDVRLVYLAVLNLFKHRGHFLNEYLEWEEHDKNMADLFREFYETLPEESELHFPQTADWTLTEEILGSRLFSRSEKAEKLAACLGIVRNQNKAEYEMIKLFCGMSGKLALIFGQEIAADAYGKKQLSFRSSSCEEEMEALGDCLPEGYMDMIEAAKRIHDKGLLAHILKGHTYLSQARVETYEKHKEDLKKLRHVMKKYCKDEYDAYFRTMTDHNYSGYVGSVNSGKEKIRRNRGAKKEAYKAFWKETKRLLNLMPQEDQEVFYLKQELEKETLLPKQRTFENGVIPNQVHLAELKKILSNAEKYLPFLREKDENGLTVTERICKLFAFRIPYYVGPLSVKGGEGRNWIQRKETGRVLPWNMEEKIDMAKTREAFILKMVRQCTYMKGKNVLPKNSLRYEAFMVLNELNNVKIRGEKLDVGLKQKIYRELFLTGKKVTGKKLFQYLCVNGILSPDEQEAVTGIDETFHQSLTSYGRFRSILGDEIENREMQKMAEQIIFWGTVYSNDKKMAGELMRETYGELSEKPYLTESQIRRISGFKWKDWGRLSKDFLELQGCSRKDGVKRSLIRALWETDCNLMELLGAEFTFRDTLTGQIQEQEKLLGEFCYHDLEDSYLSAPVRRMVWQTILIWKELCQLMGEAPARLFVEMPRGEGEKGKRTVSRKKRLEELYQACKADSRNWLKEIQDLSEDDLRSRKLYLYYTQRGRCMYTGHPISLEDLLLGNRYDIDHIYPRHFLKDDSLENNLVLVEKESNGHKSDTFPIEASVRRDRQGLWKSLKDGGFISQEKYKCLTRSWDFTDEELAGFISRQIVETGQATKYITGLLDRLLPETEIVFVKAGNVSAFRHQTELLKSRLVNDFHHAHDAYLNIVVGNVYYTKFTQNPANFIRAYRRDQKGNAYHMDKLFWYDVVRNGAVAWKAGQAGTIGTVRAMMARNTPLLTKRVYEAHGGIAEQTIYSAGEAKERGYIPVKSGDERLRDVTKYGGFSSVSGAYYFLVEHEKKGKRVRTLEQMPIYLKTSLEKNEEAWKNYCIETLGLVSPEIRWKKIRMRSLVKRNGYLMNLAGRTGRQIYAENAVSLCLSQKWVNYIKGLENFKESGKEEDRRENKEKRITKEKNELLYQELVIKHRDTIYRRKPNPIWTKLIEKQAVFAELSVREQVNVLLELLKVTQCQNLSMDAKEIGVKASPDKIGIEVTAQEEFLLIDQSVTGIYSCTIDLKTIKRPAATKKAGQAKKKKDYKDDDDK

SEQ ID NO: 123 - protein, 1388 aa, synthetic construct
MAPKKKRKVMGNTRGKDKYYLGLDMGTTSVGWAVTDDRYEIIKRHGKALWGIRLFEQANTAEERRAFRTARRRTERRKNRISLLQQLFSEEIAAKDPGFFVRMKESKYIPEDKRDLEGKRPELPYTLFADQEFTDVEFHKQFPTIYHLRYALITQMNEKPDIRLLYLALHHILKHRGHFLFEGKEISEGMNFSAAVEVFLDCLEENGIELSEFQQEDKIRKLEEILTSSDSSRTEKKKQLCDLFAGKDKQKMALAGLIAGCKVKLSVLFDDRALDEEERSEISFSDDNYEEYISQVEEILGDRFLLILSAKAIFDWSILSDILGTCSYLSEAKIQSFEKHKRDLNKLKNLLRKDRACYRKVFGEPGKTANYSAYVGMVKKNGKKQPINKNCSREDFYKFLKKTLQDIPCAETDRKVRDEMLEEIEKGTLFPKQILRDNAVIPYQLHEKELNKILENAVRFYPFLEKIDEDGYSVSQKIKEIFRFRIPYFVGPINTYHKEKGGNSWAVRIGNNTDKIYPWNFSKKIDEEQSAEKFIKRMTNKCTYLLGEDVLPKESLLYAKFNVLNELNNLRIDGELVSVEMKKKIYHDVFKRHKRVTGKRVKDYLIREGLITKEQELSGFDQNFKSSLKAYMDIKQITTGISLTEQQQEDIILDITLFADSPKMLKRRIKQKYPQLSDKQVTQLSEKKYSGWGRLSRAFLEEVEAVNPETGVAMNLITALWETNDNLMRLLSKKYSYAEEIEKRNAWGDSESEISYQTVQDLYVSPAVRRPIWQALKIVKEIEHIMGSAPERIFVEMAREPGKKGERKISRKSRLQELYRFCKKEASELYDSLSQKDDNELRSDKLYLYYTQMGRCMYSNEVIDMEELFTNRYDIDHIYPASKVMDDSLDNRVLVKSERNRSKSDTFPVPESYVKQAGDLWRTLLEKGLISKEKYHRLTRRDSFSTDELAGFIARQLVETRQSTKAVTQILNKAYPKTEIVYAKAKAVSDFRQQFDLIKVRDLNDHHHAKDAYLDIVVGNTYYVKFTKDASWFVKNNPGRTYNLKKMFENDVKRGDEIAWTSGGKGTIHTVKKWMRKNNILFTRKAYEVKGGLFDQQLVKKGKGQVPVKGNVEDTRLASIEKYGGYNKASGAYFILVQSDDKKGNPMISFKFVPVYLAQKLEESQENMLQYCRGELELINPRILIPKIKMGALLEVNGFRMHLSGRTDNRLLFKGANQLVVSENIQKTIKKVGKVCADYAINKNVEVSDKMGLNEEELMRVYDTFDDKLKNTIYGNQLSAQIDALENGKEKFVHLSKVQQCLVLNEILHLFQCRSVLSDFTLIGGFKRAGTIRLNSNISKLERVFLINQSITGFYEQVIDLKALKRPAATKKAGQAKKKKDYKDDDDK

SEQ ID NO: 124 - protein, 1448 aa, synthetic construct
MAPKKKRKVMDKNKPYYIGLDCGTSSVGWAVTDEEYHLLKGTHRIKSEKGTKNKKQTLWGFRLFDEADTAAERRTHRSARRRGARAKTRLKLLRMLFRDEIVQVDPEFYLRLKESFYYEEDKKLQKNSKNTLFNDANFTDKDFHKKYPTIWHLRQAIIKADKIESFDIRLYFLAIQHILKHRGHFLFDGKLKNGRGDFGEIFAEFCDIAKSYGLEIEESMQSEVERIILSDSTITDKKKQLKDLALFLEQDEAEDAKTLLRQQRCLCDLIAGGSVDLAKLFALELDEKCSYTLSQLDEKEDEIAGKITLDNMPLLVSAKKLYDYGILSKLLGEHSMLSDAMVANYEQHKKDLKELKRVFKPHEKIYAQLFKDNKYSKKSNKFDVSKNSSYDAYAGHAYQKEGDRNGHVIVSQEDFNKHLKRLLEEVGYNGELLTRAEKGYLLPKQRGQAKGTIPMQLHANELEVILEKLQRDFPSFAKVVPGEDETCNNKAKKIMKIHEFKIPYYCGPLVKRKFDDDGNSVANGKSQFSWADEEIVKLVYPWNFDKLVNKDKRAKNFIRRMTNECTYLIGEDVLPKCSLIYQKFMVLNELNNLKVNGHRIDNSIKQQIFERGYKEGEIKGNITLKKLEKWCKDNSFIGADDELSGTNEVKILPKYQTYQDFSRVLGIDFEKKYPATKLEKVIELITILSDEKSILKKSIKTELNCDDELTTHLSKLSYKDWGRMSACFLNGININNRTIIEYLWEDNNNLMELLGQEVGFGKVVEEFNSDKRSKATKVNYRDIEKLYCSPAVKRSVWQTIKIVNELTENLGYAPKKIFLEVTRGEDEKAKGKYTLARKKDLEAKLKAVKTEDTRAIIRELDGYEDRDLQSKKLFLYFSQMGKCAYSGESINLEELNSSRLYDIDHIYPRSKTKDDSITRNLVLVKASLNREKTNTYPISDSIRNKMHAMWGAWYHSGLITKEKYERLIRGSELTNDELGGFIARQLVETSQSVKSIRDLLARAYPGTNIVMVKAGQVSEFRHMMSCDKKDCDGNVYRPGKYEFIKVRDINDLHHAKDAYLNIVVGNVINETFTNDPYKWVKDRNGKEYSINQKRIFRESKVYRKANGEETSYPEVQAWQFADSIKLISDVMKRNDVIWTRMNYIESKEISDLQLVGKGKNADGLLSIKQQKRLNPEKYGGYNSLKGAHFALIECKDKKGNVQRRIVQIPIIAKDNIEKYIANNYSEAQVILPVIKYKSLVKINNFPLHIAGKTSSGLVLYSAKQFLVDEDTSRYLKLIQKVIGKIKAAKNHYEASSKDAVSQSENIKVMRKICDRLEILSEMPSFGDKVQEIKKYNELKFQNLDLESQCNILNNMMKVTKCNAETGDISILVPKSSHLGKPTMPEDIMPRYSAVALVNQSPTGLYEEIVDLKTVQPKINKQGENKRPAATKKAGQAKKKKDYKDDDDK

SEQ ID NO: 125 - protein, 1491 aa, synthetic construct
MAPKKKRKVMKKLSIAIDMGAKNNGIFMVKTDGDKIIDKKASCIVIDGNKINFSKKSRRKNRHKDRNYKRRKLAKRLLDELVDMSQYDQKQAEFIFGTLNNRGYTLLSSENEFEELSDETMKFNKLYLEAISGQATKEKFELYFTDEFDDDKALLNFLDTNIKNIKKTISNLINFSKKDKILDDLVSLKTNSIKKFNAFSHVKILLSKYGYRDLGKNEKDITEKLKNNNIYLSKFDFDKEKQDIESLNFDKESVKDKSIITKDLKLLKEFLSGIQKEIATGAKPRKQYLKEIKEEIEKQFDFIQNFTKDEFFNIVGNISNLQLRILRKFFNKNSTKNSQLQVLKRYFVAFHYKDEAKSRRKKLFVELNKHNDILSFFKTCDPELTSPPYEDMNNRDTYKCNSMLIKPELITDDIKKAIDILLSKDEFATITQEIDKSTGEFKHIGIRDKRVSKHQKLSQKELSKYNNTDNHAPIIYQSTDWTYSKYLQRIFDMKLFDKITKYKNADKIYEENFNSFYHPRNVFKHTKKFEKGKIDSIELFKKLFGKDTYDSLKPIAEIYYKEEQKIKNGIYSHDTSVFVKCGTNTPYKNNAKHILLKPLYSYSFTSDESDKYLEAIKKTRGLQTQLELISNEAKKHQNGFYNIVKACFDDDKCVADKEIKKIITNLNPNLEAIQTIFKDLNIEAKYFNSIEKVDENNLTTIINILKQTFEILFKELSGFNKTCQNCTKENATRSDQTFPIAQRLLSDVAKPIDGMLDMMIDRLAHEITTNIDKSDIEDIVQLDILLEQNRFEFEENLNVIKRASNKDIKKLKREYKDRLNIDICPYSGKQFDKGDYDHILPQSKGVYNSKANMIYVSSDGNQNIKGATTWTLDMLKKPHLNTMFHTDNIKEIKEFIKTNIARIDQTNFTNFDNLKLNEQIAFRYALFMEHTSSEFKTAFDLLKKDKLKTITNGTQKRLARLVYEKLVQKFPYEFNAKNKNKTLKIDVNSKTIDYKLVSTTRRYLAVDQTTGEINHLFKEDIQDSHSHCIDAMVVFYLANSDAQKIKRSDNLSDKISKRVFNFDFKDIYVEESSINNIAKNKTFINSPKKELGSYKLFDDTIYSENYKHITKENTTKKELEILVKYLLLFVYEKGKKIVIDNIEKVKEKTIYKIDIQKVSNTIYKLFNNKDKPGLVSLKFLDKYQYFTSRKEIQNIFFDDKKTKLLEYEKIKNIPYFSNKLYKAVYKKLLEEKKLFDISDDKKTILNSKILEELLQDMFDSKQKAENKKQRKRGKKRHKYSLPILGSPKFRIKRGKTWQVLGNKDIATKNYIIDGDIKPVPYFSKNTIPLKIKDLIDCLLVNKDDKNIYSVTIDTTKICDYVSNLTYLITEAKRCTVISTFVKASFVDVDISSVGVFDGAKDKVFESFIANYIDNKDLELSKYIGSIRDGINAKATIVDNNNQTITLKYKASINKDKKQIILDNLKDKKRPAATKKAGQAKKKKDYKDDDDK

SEQ ID NO: 126 - protein, 1657 aa, synthetic construct
MAPKKKRKVMNNNQVLSPIAIDLGAKNTGVYFAHYPDLDNLNKEDLKKFSSIRTFIMDKKTFSLLMKDRTARRHQKRANIRSKLAKRFFILIARQEYPELFEDDNKINENIKIAISYFLNRRGFSFASALEKLDDEDNKLLGKLPSHFVEKMLSALEKNEYSNGKEIARLIRAIVSDLNEKDLNLLEFVKYRTNSPNEYSELQKLLRVPIDEFKKELRKEIAGLDKINEDKKRKKLIADKKKKITEEFTTRFGILRFNDSEPKLPNDENGDPDYSISEESIPDDINNTNERLNHYYKWVLYYLFEIINETGNYHRKDYFENCRKDYESANNDTSIGKCIRQLREKIGDNRKIEFQNLLFNISNFQLRLFRKFFNNKEHQTGDKWEPERLDKIFIRYIRSWHVDAQKDGADKLKIRKDILSNFHSLILTHGSRTITFLKNTTPTDTIPPYEDQNNRNIPNCQSLLINLDYFSNKKQFKYFNEWYEILTTKKFAANLDSKMDLSLSVEINNTLSSYDNYLKRTQSKTHSINTYLNKIIKDTKSRKLAFVLDSIRTLHKGKKKDAVEYLLSHIEQNSNNNEIKIGFSDFIYQYYWAIDNSKNTKVNQLKYTVNKNENPDPNIQKNFPKYIKNYFKQNSILLECEGKTPSKNNTFIESICNILLILKSDIKEDLINDKNKINELQNKLIDGLKSKKISRSSVYSHLEKCAKAQKDYKNILNEKLKEIKNKEDTIDKEDKPLKNISDNIEIATDEIINVANTTFQINKHLIDRTKINNIYTHAQLFSFLDDRKGYSTICRYCVEDNLIRLTKINNTEKRITHRLSASSVRIIDGVVEKYLGHLARIIANSKWQQIKSYNLEKGATVNIPVFIEENKFDFEVNLSIYKGKNSKKVKKSKIYSLEDRIKDTNIDICPYTGKKINNMGELDHILPRSYTTKYFKQVFNSDANLIYVSQEGNRDKEDRLYKLSNLNTNYLKVVFPDCKDTDEISNKIIANIPKILKDYSNFANLNSTDQHILRHSLFLPENHPMRKRVIEEVLMTHNKTKVNGTQGYFCKLLRDELIQRNNGEFNLDFYFQRIPALEVSYYRKTLSKEEQKQEKQPPYSHCIDAMLIFTTGMLNIFDSYSDSNKIENLVPIQQSWKLANVLLSLLTSKSNKNIQDTKQLLHSIYSLIKVNESDHSVIPIERSTRDTINVSHRKLYEDNFYALRIYPLWLGCKKQKKESEIILSYGFNEKTISDLSVKNKKLILKYLYLLSEDSVTKLRNCGISDELMSKKLSDIELIAVENKLQNYFSTSNQKLFWLNIDRAKFLEFYKDNNIYLNKESDKDEDVVYYKVVSNELTYKTTRESLYNIFYDEKGNFNKKKLSKEHIKESTNDPNVEKILLKIYDNLIKSANPDLFADDLKGKNRDIEILKEIFQKPRIELNHRSYKQKLSIPINSKDGAYITYRKGWDNSKVIQISKKSNNVPQKKYYIDTSKLKEQTNDIYNTKNNKSIDVNDIISKHAIEIKKGTEINIKKLLIDFSKYSNFLKTLDNIIIIQITNRLDLELLFKQNVKIDDILKKSIHTLFDIRNIAEEIKKNDDKDVEDRVSEKTIVDKHLLFYSNVNSNSVIMTVKGCRKFMGKSFKKLLPNYILNNNKRPAATKKAGQAKKKKDYKDDDDK

SEQ ID NO: 127 - protein, 1384 aa, synthetic construct
MAPKKKRKVMSEYYVGLDIGTSSIGWAVTDTNYKLQKFNGKTMWGVRLFDEAQKAEERRIFRASRRRLQRRKQRIEWLQNVFKDLIGQVDPGFFQRMKESYFWLEDKQLDNGQQTKYVFFADKNFTDSDYYKRFPTIYHLRNALMHESSPFDIRLVYIALHHIFKYRGHFLSDADAKAFKASSLADFSTNIQKVNEYLDDAFSDGRCLSVDNVDDLLVILTDQSLSASARFDKICERFPVEKTMEGVRQIKAIFKLLCGLTVKLEDIFDNELLQDGEIKKLDFKSDFSDQEEVLRSQLGDDYFLIDVLKQIYDFVIVRKLLSEGNTLSEAKISLYEKHKNDLKRLKQVIKEHCPDKYREVFKAKDKVDNYPAYSGHESENYRCNYEKFRLFLTKKIFKGLENIPEITQIISELNLERFLPKQTTKENSTIPHQLHELELEAILNNAARYIPFLNEKRGDLSVKEQIIQMFKFRIDYFVGPLNPKSENAWAVHRNTEKITPWNYDSVIDLDKSAEYFIRNMTAKCSYLGEDVLPQNSLLFTKYHVLNSINKIKVNGYPISVEDKQNIYRYFEKTGKKISPRTVRDFLLSCGLLNQSDEIGGLDDELKADLKIFKTMREILGETFDEKMAENIILHLTLFAESPKQAHSWLKSAYGKSLTEDQIKQLSRLRIKGWGRLSSEFLTKIEAVDEQTGEVTNIIGALWETNNNLMELLSPRYGFSNAIQLYKQEKFGSQKMTLSQYLDEAYVSPGVKRSIYQSLEIVDEVQKVMGKVPPKKIFVEVTREEGEKRRTKSRKKNLEELYKSLSSPEVQAIRSYLAQCDEQMIRKEKLYLYFLQLGRCMYSNERIDIVDLESKYDVDHIYPQSKVKDDSLDNKVLVRREENGKKGDVYPLLDSVQDRMKAHWSYLLQVGLLTKKKYERLIRRTPLSDEELADFIARQVVETSQSAKVVADLLKRKFSGKTDVVYCRARHVTDFRKDQVIDKNGEQKHIDQCVHRNFVREQDPLFVKNRLVNDLHHAKDAYLNIVVGNVYDTKFTKNPLHYIKQQGLKFTRNKLFVKDIPGAWIAKGDESINIVRSMMRKNNVLFTRKTFERSGAFFDVTIMPKGKGQRQIKAHDARYDIKKYGGYNKAKGAYFCFVSHEEKKKRKYSIETVFLMYKSLYEKDPVRYCEEILGLSSPVVLVPKIKMNTLFSIDGALLHLSGRSEDRLIFNNATQLSIDPQWHVYIKHLELCSKNDTVTTSSRIASDRNEIFFKVLLQKLTTNAYSKALETFAERMVGTEKIFASLTLEEQVQTLLQFLSIFACRATTVDISSLRINGKSPKQSRIRRNNTVTESKRFVLINQSVTGLFEKELSLNALMTKKRPAATKKAGQAKKKKDYKDDDDK

SEQ ID NO: 128 - protein, 1374 aa, synthetic construct
MAPKKKRKVMKKYYIGLDIGTDSTGWAATDESYNFLRLKGKTAFGSRLYPKANDCKERRTFRSNRRRMQRRKYRIHLLNDLFAEELNKIDKNFLIRLENSTFNFEDKKDKTSVRTLLFKTFEEEKNYFKNYPTIFHLRKKLLEDDSTSFNDLRNLYLAIHHIIKYRGNFLKEGKLDYSDFNNELLIRLNEILKTIYLEENEEDFDGDFINSNDKENFKTILLNKNLNKTTKKKELKKLFNVSSELCLAYIDLFVSLITGSSYSLKNLKLESDNKISFEENFDEKVLEFEQLLQDKFEIVQIAKEIYDYVSLNDLLKDEKCLSNVMVNVYDEHKKDLALLKKVIINIDKQKNNDHNLYNEIFKNTNNKNNYSSLVKVNTITDKKTSINDFNKELLKIIKENKDFICEEDYNYLVNKLENNELLKTIANVSTGVIPHQLHLNELEIILNNAIKYYPFIATIKDKIIAIFKFRVPYYYGPLDDRSNFSNVVRFNNNQVYPWNINEVIDDNQTRQKFMRRLTNNCRYLFDCKVMPKSSLLYEKFLILDRLNAMEVNGSLLSYKEKEEVFRYIISRNKTTISNLKSYLKKIYNLNDDITINKISLEVPFEAPSHALLNQFFDLETENEKVENLIFLATVYADDKNILKTILEKDISLDKKQINAILSLSTKKWAPFSKELLSGIYYIDDLGVASSIIDIMEKETKNFQVVLNDSKYNFQTIIHDFNKEKRGELTNKEVIDDLLANTPAMFRRSINQTLLILDDIVSITHQDPEKIFIEVTREDLKEDKKKQYDKRQDELKKFLTSLKNDVDSLMKSQSKKLLEELNDENIINKLKIKSKHVYLYFKQMGIDVYTGKIIDLSDVLNSNKYDTDHIIPQSKIKDDSLDNLVLVERTYNQRIKSDAYPIPEEIKTPEILKLWKYLFKIKAISEKKYNNLIRNKELTLQEMEDFVARQINVVNYSNVVLRDVLNIKYPNTKIVFSKAQYASYLRKELKIAKNRNLNDTHHAVDSYLNIVAGNILSTTFSNVRTRYIERNIEEKTFNMERVLNYNLKKNDLANIVKNNCLRHDALVTLKLEYNNSNLYKQTIYKANSSDSLIPIHTNNCMKNTDKYGGYLKFTTHSLAVISYKIKGKEIKKIEALKLMNLKMYKNNFDELIKSLVTEKDATDIKLIKFIGLNQKIQANGGIYYLYSSNEDKNKYKMAYQNYIDNDLLLYFNFAFKKIDQLSEDNTILQQEIITNKYEEHNFIITKEKNKMIFDSLINNSFNKVYDSCNYIVKLRNLKDDNSFNDFSLKKQIEVINQLIIYMSRNSDSSNLKNYFSNLSNARMLLSKNITKNNIYLIHESPTGLYKYKKLLKRPAATKKAGQAKKKKDYKDDDDK

SEQ ID NO: 129 - protein, 1683 aa, synthetic construct
MAPKKKRKVMPNRLVISPISIDLGSKNSGVYFAHYQAGSFLGEIEKEGKVYQLEKDNFTLMMVDRTARRHQRRGYKRRRLVKRLFRLIWCQEFGLEWDDKTQQAIGFLFNRRGFSFLTEEYDTEALKCFPKDAFNELPKKIQKEIVEIGDTCNLDEKMSEWKQLGQPEITKIFATVDEESKVINRKLLMIGRTNLLKECCKKRIDGKQIEKNKRNQKQYSLSQWIFDEWDDMGIVGLHSIREKGNSVDLAEKLNQQNSSVASEILHSIPNDLDKEKAELNASPWNFNSKKFNLEKSSFERKIVSGNSARIKNKNLQAKKKWIRTHLHHFTFALHTVVQELSTGARHRSKYFQEINDVLECVSHEHGCLNTFCNKLQTGETRIRNGTSLTPESLANLIGNMSNLELKPLRKYFNDKRHKQGDFWDRNRLKKLFGNWILREWRVNPEKDLNKAQDAEFDYQTLRSNWKVHQGSVVDFWLEQSPSFTIPPYQDNNNRRPPKCQSLILNTKFLDNNYRNWRTWLKELLFLPEVNEYLGNYKKEMEELKSGKGTAYFRGELTNKPQLDSGRRTAKDLDARILQFLLDRVKDEDVLKLNEIYSHTKKFRQEQTSPEDRGKARDKLEKAINSSGLSADLKTPRNYKYRAVFAEGSFMHLVCNYYKNRQKARKGRIFIHPEYRFVKGRGFENTGRFDDRDHLLTYCNHKPRQKRYQLISDIAGLLQLPSQQLKERTNSNNDEDLTEWLKNNFKGLKTNCADAAKAQKKFRGHLKEKIREVWDGSNSQDKLFRLAKKCVALCEVIGSRLFDDEAQRQKWIQTLEDRPANAVFLLAQINNIAFKERRGNARTCSVCSLDNSQRMQTFKNNVKAQRLPSIPTRLIDGAVMRLARILGGAIAKDKWARIEKDLLLGTEVRIPIITESNRFQFEPNLLELKRPYLDAKEYNKRKRELDSSLDSSNLKKIQSSKKSRIKGSAQLSPYSGVELGNTGDIDHIIPRAHPKWGTLNDEANLIFTNEQDNRVVKGNSEFSLSDLHPSYKNHVFGTADDSQIEKIIKEEIGNGQGGQFNFGRYFNFIELTERQQKAFRHALFLIGDPLRKLVINTINHRTRTLVNGTQRYFAEVLANTLYKKAKRINKHHLLSFDYFGVEAQDNSRGDGIHNLRHDLVTHYREDLDSYSKSDSSPQKPYSHLLDAQVAFCMIADAHRGSGGLRLELGNTGIWSRVDQMTREVETKKSRVHDDSLFKAIQVNPRNFRKISLERRKPNHQYFKHRSIHRDGMYAEHYLPILIHRKLFEVRIGFDWKNSFQLKNTRQSRKKLYFALKFNPKTKLLALNEDDSFERLEFQLAQIGFNSKMDYFCISLNTQMIHSHYIEHYNSSEGYQDYSPEMNFLRNTLSYRTERKRITKLNDAKIILGNEKNFKLPKDQSYLILPVRNEWAKLIDAWENSPESENGEFLSKFFSPKHQHPHKKFRQDYSLPIKSSGGHRLLKRKSWNNRPIFQIVNDSDSRTTGAKAFIPVCNSEGEIGKLLSESAKSRNTFFLKKEKYYFELSDTVKLIDTDKWHQVELSEDLTKLGLTELKYQIDNNTRPGIRVKFDQLLARGKVDEIFQHSLLKPRYLNKLKEEFQTNLNSNELESLEYTAFGFSKDVKRSLRKVLQQYYFGESDKNKRPAATKKAGQAKKKKDYKDDDDK

SEQ ID NO: 130 - protein, 1459 aa, synthetic construct
MAPKKKRKVMSHSDVIPSQSLLSSCLALDLGAKHTGAFLVVRDAYRPATSSDCHAMTLVLPDDGDKMTYSAQARRAVRHRLRNKKRHNLARRLALLLIPQKIKEASITLDSTEEQKLIEAICSLLKRRGYSRLESDSATDLTSLENLDPAVFANHSELGQFFCDAADIPSQWENLTQDLQQISAFLNKKPTDKAFKTYFSKNFPDLKSQSKAYSNALKVLSDDANLLLQQVRFGHRHRKQYLEEIHQDMRHDSRLTKAVQAFGDLDRLWRLIGNLSNLQLRAMRWYFNAPELFEDRFWMPERLQKTLIRAFKYFHCEKGAESQNQRQLIKTLESTTDVFEALCTIDPERTIPVYEDQNNRRPPVDETLLLSPHKLTEKFGTIWKTWADSLIKKDPALEENLDLILAYTDRRSRIAIASNPQRYSPLDYRFSYVLQRALDRSKKLDRYALRLLATDAQSQLAHTARAELCRVIGSQHVDAFIEMAKMYYAETADARVGLWIDGQANLLEKSNIHPPMKKRVLNQLVGDVFGLDADFGRAFIENYWNCKLAEKSRSSMRSTCQFIETVRKQFGGEFNLLFKSKTSTTKDITSVKDRIEDVKDFLKNKLQLSERTIERVANPFSLSQLYTLIELDRTGFASTTVAVQLENSWRMSTSDGQNAQCSRLPADCVRPFDGVLRKLLDRQAYELAKYTFDAWKKNVKHDGTTIHHATVVEENKFAFTASLATLKKNTAAKKKATDALQRQEARWLSKDERIKEASQNICAYTGVALDSCICEYDHIIPRTLTKSVLSTAFNSEANLICVSQAGNQQKKDARYRLTNLHSKYLAAIFGTTDCKAIADKIENRIEELKRNRRLRHFELLNAEDQAYVRHALFLDDGSEARKCVLSELAASNRSKVNGTQAWFIRCYLEKLTQLSRDWLNKHHHTLICQAMRTSTDATRKFRKALAQADAVFTKEVIQPVASHSVDAMCAYAAACVSDGFCYFTQSDKQLADFTQVDLLKTLHPQTCTVNWVTSLPLEEKKNHDSKPLFKEGILSEKFLPIITHQGKIFIGFTLPQKTTPNSENAILVQGEDPTYLLRILAPYLNNDVNVNNSSFCTYHINKHRAFELFSKAVLNKSLLTKEEQEATNILEGLRYVTERIPVLKGLINQSGKALIQAPSEFNKSYFNISFKITHTLFGASGTLILPAKADWLKLFKHPDLKDLFGKDLVTLEDIDLENCFQVIHRMNASKLAHTSVKRIPSLPIVRKASGGFRIRRQTLSHDHVYQLYNYETATSGEFACNDNGSVNWKKPILFDHLVNNNVTPFDSKPNPKPVKTVKMRDFRRISEDNDMLVDIAPASIDRRIIRITMNFDKLKNWLTVAKADCQPIHPLDLPVNIKLKEPQLFIPKDLSTARFLGIPRDGKIQFKQIGSRVTFWYTVRNSTDFMNQAFNNAARKRPAATKKAGQAKKKKDYKDDDDK

SEQ ID NO: 131 - protein, 1406 aa, synthetic construct
MAPKKKRKVMKEYYLGLDVGTNSLGWAVTDSEYNLLRVKGKILFGVRFFKEGISAADRRVNRSNRRRTQRKNLRLDLLREIFEEELNKKDPLFLKRLDESRYWEEDKKVDSKNSLFNDENYKDKDYFKDFPTIFHLRNNLMGENRKKDIRLYFLAINQMMKRRGHFLIDGNLKDVNDVSGYKERIEYLLNEEFDLDGEDILEKEFFDKIFEVILNKKENKTTKKNQIKEITLSYISDKTKKKKMEEFWNLIISGKNSVKNLFDDENILKELEETNKEKVEIVFFTTDFEDNHEYFENLLGEKIEIIDTLKAIYDFVILQGVLNGAKTLSEAQVKRFNEHKKQLEELKKLVLKYNPSKEIYNRIFKEKNKDLHNYVSYIGVYKGKKEKETIKKISADDFYKFLKKQFKELCSDYESNEDFKEILNEIDKSNYLLKQIVSTNSTIPYQIHLIELEKILENLEKDFPYFTNISDGIKFSEKIKLIFTFRIPYYVGPLNNAKGENSWIVKKEGMKNKKIRPWNFSKIVDEHECEEAFIKRMINICTYLPNEKVLPKSSLLYSEYMVFNEFNNLKFNGEKLSAELKNEIIENVYKRYKKVTIKKIRDYLITNNYATKDIEITGYNGDLHANLASYIDFENIFGNNFDRDMVEDIIEQITIHVGNKKLLSKKIAEKYPNITEQQLEKIVNKKYTGWASFSKEFLSNLKGVSLETGEQNTIIGFLKSQNDNLMQLLSQNYTFMEDIDKLNKESRSDKLSYDVIKELYVSPAVKKMIWQVLKFITEIKKIMGGEPKKLFIEMARADEEKNKQTNSRKKELENLYNGLSKDDKTYWNNQIKEKEEYYFRRNAVYLYYKQLGKCMYSGDPIDLEDILSGKGDFDIDHIIPRHLKTDNSVQNNLVLVKRNLNQTTKKEQYPIPSIIRNNEKVKKLWEFLRSKNFISATKYDRLVRKEELTDEELGGFIARQLVETRQSTKVIKDLVSMYFENTTVIPVKADLANSLRKDLSFAKCRELNDFHHAHDAYLNIVAGDVWNKKFTINPINFIKEINKEGNRNRKYSLYEFFKEKQFSKNRGEKNKIWDPDIAKKKINKVLNTYTLLFTNDTYEQRGEISDVNIVGKKQIKKGTKYLAIKKDDRLKDVSKYGGYNKIKGTYFFLVEHKEKGKLIRTIESLPLHKKVEIKNIADLQNFAENELKLIEPTIIISKIPTKTELEINGFRYLLNGKTDNRLSIQPFMQMFWDTTEMYEIGKLFKKYSYNTKTKKAEDENGENKEKEIFDSSDKENIKKYLKILIERLHKEPFKNRINIPELNINEEMDSIKMFELFKEILNLSRRTLESVNLTSIGGEKTQGKTRINKKLNHNDSIKIILKSLTGVYEKKVDLNKCLGEQLKRPAATKKAGQAKKKKDYKDDDDK

SEQ ID NO: 132 - protein, 1430 aa, synthetic construct
MAPKKKRKVMESKNYYIGLDIGTDSIGYAAADESYRLLKYKGEPVWGSHIIEEANLKTERRQHRTERRRLDRRQQRVTLIREIFAKEIAKIDPDFYKREEESALLAEDVSTSKGLFTDIGYTDKKYHKSYPTIHHLINELMTDAAPHDVRLVYLACAWLVAHRGHFLSEVSLDNVESVVDFKTVYDNLTDYFAFEIGCEPAWDNADPDEIEKILVKKIKSTSKINELNNLLFGKKKPETEITDAFPFSRPGIIKLLCGKDCSAKDLFGKEEYAEIKSLKLDDDELDSNLSELGDDAELVLRLKAVYDCVTLHDVLGENKFISAAKVEAYEQHKRDLAGLKKFIKKYAPEKYNEIFRKVDKSTANYSAYSGNIKSDKNTKADWKKATPENFCTYILKIVNNITPAAEDKAFFDDMVARLQKDVNTFMPKQVNGDNRVIPYQLYYVELKKILENAEKYLPFLSETDEEGYLTKDKILSVFTFRIPYYVGPLNASSPYAWIKRKAGRITPWNFSEMVDGNESEQGFINKLIGVCSYLPGEKVLPKQSLLYQRFTVLNEINNITINGLRISPEIKQLIYNDVFKKNKKVSVKKIKDSLRQNNHSKDDVETIAGIDISIKSSLSSYISFRRLLESGTLNETDVEKIIKVSTYMESRPRFKAWLEGEYPNLSDNDVKYITSLKFKDFGRLSEKFLCAILGSRKNNEKEDNGEASSIIDALWNTNKNLMELLSDDYTYSDAIKRYSDNYYMANGVKSLDERMDDMYLSNAVRRPIYRVLDIVSDIVKAEGKAPNKIFVEMARGAKPDEKGKRTTSRCGMLKALYKTIDTDDVRRLEQELEKMGDEANSRLQSEKLFLYFLQLGKCMYSGEEIDLNNLMGKRYDIDHIYPRSKVKDDSLFNNKVLVKSKINGSKDNNYPLPENIRENMSGMWKKLLDGGLITEEKYRRLTRKTGFTDDEAWGFINRQMVETRQSTKAVATLLKEYYPNTEIVYVKAGLVSEFRHEKKLWKAILPEEERYLDDSQIEPWKTELWKSRTVNDLHHAKDAYLNIVAGNVYHEKCTKPWYLSNKDNYSINLISLYSLTPYMVGERKIWDGVNSLETVWKTVHKNAVHYTIYPFSRKGGLFDQNPLKKNADLIPRKKDLPAEKYGGYNSPSVNFFVLVKYYFDKNSDVMFMPVELSVAEKYMSDLNFRLSYSQKQLGKILNKDKKADKKLKISRVEFPLGNRIIKINTMIELDGYRMCITANSSGGAEIKVSSMTPLCLAPEWEFYIKKLETFDEKKNNNPNMIYMEKYDVVSPEKNVELYDILIDKLSNTVFKKRPVNPCDDLADGKAKFAAQDVFKQTKCLLQIVGIFGRINNGFDLRAVGGGQYAAKSRRSTNLSNWKKYYSDVRIIDTTASGLFEHRSCNLLDLLKRPAATKKAGQAKKKKDYKDDDDK

SEQ ID NO: 133 - protein, 1367 aa, synthetic construct
MAPKKKRKVMKQNGNNEKIKEYYVGLDVGTNSCGWAVTDPEYNVLRFKGKSMWGARLFDEAQTAAGRRTARTARRRLARRRFRLDLLESFFEKEITNIDPLFFRRLKNSNLYEDEIKAETGAYSLFNDKGYTDREYLKEYPTIYHLRSELIHSTKPHDVRLVFLALHHLLKKRGHFLYDTGDNDNFKNIDTALDDLQQYLDENGIPFEIQNKEEFKRALMSRIKLSEKKKKLKEVYGSIIDAEESDIDVAELIDSLSGAVIKLSKLFCDETLKETEINSLSLGDDLDEKYDALSAALAERLDLILLLKNIFDSARLSILLDNKNYICDAKKALYEKNKNDLKLLKSYIRRTNKSAYRKAFYPKEKTNNFAAYTRYKTEYQCNQEDFLKFLEKEYFKEKEELLTPEENRMYEEIKAGTFLTKLKGSENGLIPYQLAYKEVKKILENASAYLPFLKEAQADGLTTAEKIERTFTFRIPYYVGPLNKKAKHSFIARTDEKIYPWNFERVVDLDASAGNFMASLIGRCTYTNEPVLPLNSLLYSQFAVLNEINRISVNDEVIPVEIKQAIYQDLFVKSGRNVTKKQIFRYLKQRGLISDADKLSGIDDNVKAKLKSLHDFQSILENGLTKDNREMVEEIIEAVLVYSDDKKMLRRWLEKNIKELSDEEIKKICRLNYRGWGRFSKTFLQNIYHVDKNGEAHSIIDMLWETNENLMRLMSDAYSFQQKCMNYKKEHFDSGESIRKQLDDLYIAPSVRRSIWQTLRVVDEVVDIQKGAPAKIMIEMARPSKKDTKKQRTISRKEKLIALYKACDEQKDELFDRLNQETDESLRRDKLYLYYTQFGKCMYSGEKIDLTEAMKDDETYDIDHIFPRSRIVDDSIDNRVLVKSKLNRDKSNVYPIAEEIRQKMQPFWEVLHSKKLMSDTKYNRLIRHTPLTDEELSSFITRQLVETNQSTKALATLLQQLYPNTKIIYSKAKNVSNFRRKYKDHGLIKSREINDLHHAKDAYLNIVVGNTFATKFTDRFFMHIHENAAKNSYSLTKIFDHDTKGAWKSDGTSLKTVEKYMNKNNPIVTFASICVKGELYDQQPRPKAKKDGSLFPLKKGKPVEKYGGYKNPTGSYFYIVEHTKGKKTLTTILPVYLYNVVEYERDPIAYSCQMHGLVNPKIIVKKLPKNSMLEFDGIRLLITGRTGSNNVYMHNYQFAVDKTHVEYIHNIEKYVTRYETKKPPVVVSVYDKISTKGNIDLYDWLCERMRMNPYKQLFKGLLKDLEAGHEKFNALDVLAQCKIILEILKSFKCDRQITNIKELNGKGTAGILKKASNISSFNKVNVIVQSVTGLYEYKRKILGKRPAATKKAGQAKKKKDYKDDDDK

SEQ ID NO: 134 - protein, 1384 aa, synthetic construct
MAPKKKRKVMGKYYLGLDMGTNSIGWAVTDENYNLIRKKGKDLWGVRLFPEAKTAQERRSKRCERRRRQREKARIGCLQEMFADAINEKDPGFYQRLEDSRFLIEDKREHQPFVLFADRDFTDKDYYAKYPTIYHLRKELLQSKEPHDVRLVYLAVLNMYKHRGHFLNTTLTGGDSTDEFESLYKSLVEKMGRVREEEGVDDFLCVDLKNVLTDKRFSKSRKVEVIREVLKIDKKDKIKTDMWKLICGLQVALANIFPEESMSDEFKKYKLSFDDSGCEEKMLEVEGMISEEAFDALLIMKQIHDCIILADIMAGGNKKYHFLSEARVASYEKHKKDLKLLKKIYKVYLPEKYDEMFRKTEKDNYCAYIGSSNVNGKVRRRNEHCKIEELYARIKKETGSIAANSDVAYILEEIEKGTFLLKQMTALNGVIPNQIHRAELEQILKNAAEYLPFLNETDKDGMTVSDKIIALFKFQIPYYIGPLIKTEKNNAWVVRKEDGKVYPWNLEQKIDVKMTAEEFIGRMVNHCTYLSGEKVLPKNSLLYERFMVLNELNNLKINGQKISAELKQELYKELFGNGKKVTGKRIKTYLFSHGYVSSDMPVEITGIDGDCINRLSNYKKFLEVFKTETLTYEQEKIAEDIILWGTLYGDSKHFWKEKIEEKYGEILTPEQKKRILGYRFRDWSRLSREFLCLEGESKQTGETASIISRLWNENYNLMQLLGDEFTYKNVIEERTNQINKVLSEIQYEDLMELYISAPVRRMTWQTILILKELQKVLGRYPDKIFVEMAREHRKESGRTVSKKRKFEELYKKCGEEAEQWLREIEVTDEYRFRSKKLYLYYTQKGRCMYTGERIELSELFNDNRYDIDHIYPRHFVKDDNIDNNLVLVKKEKNAHKSDSFPIESGIQKNQLTWWNLLLEGGFITKEKYNRLTRKEEFTIEEQTAFISRQIVETRQGTKTIVDVLKKSCPETDIVYVKAGNVSDFRNHFHVIKCRSINDFHHAHDAYLNVVVGNVYDVKFTRSPKNFVEAYRRDPVHNPYHMDKIFDFNVKRGSVTAWDTKKSIRTVRSVLDKNSPLVTYMNYEVHGELADQNPYSASKAAKVQGEGYIPLKTSDSRLANVQCYGGFTKYTGTYFFVVEHTVKKKTVRTLEAMPLYLKANMNKIDEIEKYCRNQLKYIEPQIVCSRIKMYSLMKIDGYYAYISGRTGNQILLVNAIQLVLKREYQDYIKKLDDIFEKGLDNSALEYQKTITKEKNQELYRELLYKHKDGIYGRKPNPVGEKLEKGKAVFKNLSIMEQATMLREILKLSQRLNEGANLALFGEGKKCGITKMNKEITGLKECKVIHQSVTGLYVTETDLLNIKRPAATKKAGQAKKKKDYKDDDDK

SEQ ID NO: 135 - protein, 1366 aa, synthetic construct
MAPKKKRKVMAKKDYSIGLDIGTSSVGWAVIDCQNYKVLRKGNQKLWGVRLFDEATTAETRRLARGTRRRYDRRRTRIKLLQEEFQNEINKVDSNFFKKLKESAYHEDDKLNKTIILSQEEKNKIKKYNDLYPTIYHLRHKLISSEEKMDIRLVYLAIHHIIKYRGNFLYGASNFNTLNLNMEELFDNLLKDLNEITSIEKTEDLSLVNAKKLEEFLSLESKNDKKLELTKEFSQAISKKQTAELVKLLIGDKSNLNVLFNTESEEEIKVSFKGSEYEDNEDKIIKNFPNEIDIIEDVKNIYNAQFLLNLFKGRKEQNLSYVMVDNYNIHKKDLQTLKQIYKADKNLYKKMFKNENCIYEKYITNNMTYDDFKKEIIKSLEILNPINKEDLLEKLEKENFMPRITSVDNGKYPYQLNESELIEIIKNQGQYYPFLLDKTEDEKYKLVKILEFRIPYYVGPLNNTTSKKGVENKNSWLVKKKDNVKITPYNFNEVIDLESSAEKFIKRMLGTCTYLLKEPSMPNNSILYSKFKVLNELKQIKVGDENKEQKLSREMINKIYNDLFLTTKGSITDKKFKEYLMQTGEYTMYSNLSVTGYSADKKIANNMSSYLDFFGENGIFTNTNYSVEDAEKIIEYITIFEDKEILKRKVINEFPTLNEEQIKKICRLKYKGWSNLSKKLLTEVYYIDEKTSVPKNIITLMEETSQNFMQIITDKKYNFEEKINEINNSKNSKKLSYELVDELATSPKNKRGIYQALKVLNEIIQYMGYEPKRITLEMARGEEENKRTVDRKKVIENAYAGNSEEIYNYSKLKKELGEIEKIESHNQKLFLYFLQEGKSLYSGTPLNIEELEKYEIDHIIPRTLIKDNSIDNLALVTREENQNKSASFVLPENYRTSKMKVWWNHLKKLKLISDKKYNNLIRDKFSQETIEGFINRQLVETRQICKHVANIIKNMYEKTEIYYIPANLSSNYREKFELYKFREINDYHHAHDAYLAATLGEYRTYLKSNISYDYLKRINFKSYQEKKYQELNAGYVINSLVNADNYTELFCDPNTGELLFDAKEFNKAIENTLYQNDILVSKKVEFKTGELWQQTKNKKGEKGVPLKRNMPTEKYGAYTSISPAYAAVVKFVKNNKEDQRMIGIPIYIDITSKENKNIKIEYIKNLLNADEVEIIKDKIPFYSKLNWNGAICSLVGATDKVEVCNAKEFNIDKKHMIKWKLTLVRLFNGKKEIIDNATYNENLEEIIEYIVSKIEKEYILYQNLLDQMKEMFKINSTEKLNPEDKEKVILEMFKLLKCNSACANFKFLNESIAFGKKNGRIINDGIIINQSATGLWENYYEFKRPAATKKAGQAKKKKDYKDDDDK

SEQ ID NO: 136 - protein, 1413 aa, synthetic construct
MAPKKKRKVMNLRNTKNYNIGLDLGTSSVGWAVTDDTGALLHFKGRPTWGSRLFSEGKTASETRIARGQRRRYDRRRQRLDLLQTFFYDEMEKIDSEFFLRLRQARLFPEDRDPSHADYRWPLFNESNFTEKDYYKRFPTIYHLRKHLMESDEKADIRLIYLAFHNIVKVRGNFLHQDNPNLSAKNANMKASIDRLSEVLRAWYDEREVACEFTPRDILAILEDQAADSFRSVKRDALKNAFTFDGDHGKIASELGKAFVGYKADFASIFLLESEKASFSLSNDEAVDEFISSQCPDEGADLFEALRAVHSAFVLSGILRGGNGETISFCKVNDYERYGNDLKLLKQLTREYAPEKYARFFCGTHYDAPFHKNYDASQAEGYTKYNLGQKKSEYKSSSMTYDDFKKAVEKLFKGTPAESDDRYKEMMQGFDEGTFLRRLKTSDNGSIPYQLHLEEMTAIIAKQAPHYPFLAENQQKIESLVSFRIPYYVGPLTTKNAAVDGNQNLRFAWAKRLPGKEGERIRPWNWDQIIDRTESAQRFIERMTGTCTYLHGEPVLPKCSLLYEKFCVLNELNGSRWSQDGDDEKRFSADDRSKIFELFKHGSVSYEKVQGWLRQNNRLNPHVMGGQGETKYESKLSSHMFFCRLLNVDDLDATASAMAEEIILWNTLFEDRKILKERIEQTYGGQLNSAQIKAICKKRFTGWGRLSKKLLCELKVPTDSGLKSIMDILEEGNPSNGHLGRAMVLMEVLRDDRLKFEQAIDAANKEALQSGGGLKVEDLPGSPALRRTINQAVRVVEEIASITKKVPANIFIEVTREDDGKKKGKRTTRRYDTIKQALKSLRAEGEDKPEILSELGRRKPDELDEKLTLYFMQNGKSLYSGEPLRIECLSEYQVDHIIPQSYYKDDSFENKALVLPGENQRKSNALLVEQSIRTRMEPFWRTLRNHELIGEKKYRNLMRDRVDENQMKGFINRQLVETSQIVKFTQMILSDRFPETKIIPVKAALSSQVRSACGFVKCREANDYHHAHDAYLACEIGRFIQLRHPDIYDNPIAYTRMMRDFVRARSEELKRTGRMPGDATFLVQSFLRSGFNRETGEIFKDAWDAEAEIARIRRFLNYKDCYISRMPEIHTGAFWGQTIYSPHSNETKLLSLKKGLNTEKYGGYSNKAFAYFFIYSGVKGRSKKYAIAGLPIYLAKTVAEDEGNLLQYAQALGAEKEVSDIEIVASPILYNQVVRYQKDEFRISAEDVVYSNRQLFLPTAYSKHLAALGDNAISEGDGPLYDELYSVIIDKMDVLCTRFERIKQTLVNGKNEFLNFEVSEKKEFIKQLCAFCNGGTERRKKARINISRFGGSPNAGGMGNGFILSSISELEIIDQSVTGMFESRRRLELKRPAATKKAGQAKKKKDYKDDDDK

SEQ ID NO: 137 - protein, 1390 aa, synthetic construct
MAPKKKRKVMNMNSTDYYIGLDCGTSSVGFAVTDVDYSILKFNGKAMWGSHLFEEAKTAQERRGARCARRRLQRRKQRTALLQEIFAEEIYKVDPTFFIRLNDSQYLEEDKRIPGRNIIFNDKDFKDKDYFRKYPTAYHLRKTLMEEKVADPRLLYLGINHILKHRGHFLFPGDNLKAVSDISPVLDSIAEAYNDIFGEQLSFSSNEDIEKALLNKSSISKKEGLESGISLHDTKKKALLVKAILGYNTKPHQLFDNEEYKECPAIEFKKLSFEEKDLPEIEETVSDDEYKLILNLKALFDWGLLARIMQGNKSISEAKVCLFEKNKDDLKILKEAIKTYAKSEYDDFFHSMDNGKFSSYIGKNHDKRKGKEGRCKKSSVDDFYKTVKKILGNAPKEDAGVKHVLNSIEEDSFLPLLSSYRNGVIPYQVNKAELESILDNASKYFDFLSRKDEDGLSPRDKILSILTYRIPYFVGPLGSNADSDAHGWLVRKEKIGRILPWNIEQKVDYEESAERFIKRMTNKCTYCKTEDVLPKNSLSYSKFMVLNELNNVRLNGERLSVERKQSVFNELFKKRKKVTKKQVVNHAIKEGWYGKDDLSVDGITGIDEDFKASLGPYADFRSWIEQGKLKADDVDEIIKWITIFSEGGDILKNRIKKFYGDVLNDNDINAITKLKYAGWGRFSHKFLYEIQGMNKETGELMSIMRMLWHTQHNLMELLGNDYEFIEQVDKPQILGKLDYDVVDDLHVSPAVKRQIWQTLRIVDELRRIMKHDPRKVFIEVTRSEQEKKRTVSRKKDLIDKLKEAEKGGLGFGIEVQKLISSLEGKDESAVSRQDKLYLYYSQCGKCMYTNEPIDLDDLYNTELYDVDHIYPYSKTDDDSLKNRVLVLKKANLRKSDSYPIDDSIRHKMASFWKMLSDKGFIPKEKYERLIRTSPLSEEEMKGFINRQLVETSQNVKATAAILKSFFGEGTKIVYSKAGKVSDFRDQFDLVKCRSLNELHHAKDAYLNIVVGNVLDTKYTSEFYKHADGRGYGNVARPFDFDVKGAWLRGSGGTIAKVRDILNKNNILFTRQPVARTGALFDLQIVPKGSKKGALPVKPSEPRLKEKLQGLDDATGIYDEWTSKYGGYNSMSTSYFALVKHADKKRSYASFVPIAMIDAKRLSEPEQLLAHCRNVLRLENPVIVNPRLLMNTQLEIDGYRFSITGKSSGGKVITLVSSIPLIISQESQKTLKKIEKFFNRKKIYKDIEIDSKRDGITEDNAAALYQELVNKSSYGIYNKKPSNQSDLLKNSYEVFESLGLLNKCNVINELVNYFAMGVGKADLTLINGTKACGVLTKGAMIDLGKTDLCIIYQSITGLFETREQIKAKRPAATKKAGQAKKKKDYKDDDDK

SEQ ID NO: 138 - protein, 1406 aa, synthetic construct
MAPKKKRKVMEKEDYFLGLDLGTSSVGWAVTDTQYHLKRAKGKDLWGVRLFNEASTAAERRIKRTSRRRIEREKARKAVLKDFFADAINEVDAGFYLRMEESFLKFNEKRNDRSEGNQQPFSLFNDKDFTDKDFYEKYKTIFHLRKELLHSIEPHDVRLVFLAIYNMFGHRGHFLNSTLDPTKSESKIDIAYQEMVEALKLVNVNILESIDYDKFEKILSGRGKSRSRICEELGDFFAIEKKDKVRYSILKMLSGLKVPVKEFYNNNNEDLDEESQKKSVSFREENFEETFDEIHTIVGDEWFNALENIKTVHDIGMIANIMHGHIFLSDARVEIYEKHQQDLKQLKSLLKEYNMKGYESFFRTIDKGNYSAYVGSVYSHGKLLRRKADGRKKEDLYKTIKGLIKGIPDDNADKKDILEKIDSESFLEKQLTGSNGVIPNQVHSRELRQILKNAESYLDFLKNKDEKGLSISDKIIQLFEFQIPYYVGPLGMEFNGKKGYNCWAVPKEKDKKIGKIYPWNFYEKIDEAASRKEFIERMVRKCTYLNDKVTLPKKSLLYEKFMVLNEINTIKVNGKRLTTELKQGIFKELFGKGKKVSKKRIKEYLVSRNAMEEKWEIEGIDKDCNQSLTSIGKFYGVFGEEVYNDDNKALIEDIIYWGTLFSGDKKFIKSKIEENYGNRLNEEQLKRILGFKFEGWGKLSRDFLELQGISKETGEVNSIINFLWENQVNLMELLSDEYTFTDELNKKIISSEKPLCQWKIEDLDDMYISAPVKRMIWQTMKIVDELQTVLGYPPKRIFVEMTRSDEEKVRTVSRKEKLAKLYKKIEEEQSVWNKELELKDESYFKSRKLYLYYLQMGKCMYSGEPIDLSQLMNDNIYDLDHIYPQHYTKDDSLENNMVLVTKEENMKKGDKPIPREVQDKMYKFWLELKDKEFITDEKFSRLTRRNKEFTREEKVGFINRQIVETGQATKVITQILQQSMGDECKIVFSKARLVSDFRKKFKIPKSRIINDLHHANDAYLNIVVGNAYYVKFTNNPMNFIKQSEKNPDSEEYKYHFGRFFEQDVKNKNETAWIAKDSGCTIVTVKDTLRRNTPLVTYKVEEGHGQYFKETVYGTDKAKANSYIGIKTKDSPLNDVAEYGGKTDVATLGYCLVEYRKKNKIIRTLEELPVFLGESRSLKDENVLNYLREKFIKEGNPEAAESLNLIERFIPKQSLIKREGYYYYLGGRTNVQVYLYNAMQLKLPLNLVKYIKKIEKANSKSDYSEIDNQGEPVITVEKNQELYKILMSKFKEDPYKNRVNPINKVLENGLNTFMDIEIANQCKIIEVIILNISKSNTMNLKGIGEASSAGMCLGSMDISKLKEFKIIHQSVTGLFEIEKDLLKKRPAATKKAGQAKKKKDYKDDDDK

SEQ ID NO: 139 - protein, 1136 aa, synthetic construct
MAPKKKRKVMEIRFALDIGVASVGWAVVNDTYEVLEAGANIFPCADSSKNADRRGFRQLKRIHRRKHTRIRDFEILWERQGWNMEKIIISEVLPLRVKGLKEELSENELYNVLRNELLHRGISYLEDAIDDTVSGSLYEKAIKNNQRQLEKESFPCVIQWERLKKYGKYRGNQSVNIEGKEINLSNVFTTASYEKEIEKILNTQKKFHSILSDEFCQQYIDIFRRKRKYYEGPGKENSRTDYGIYTTQKDQNTGEYLTYNNLFERLIGKCSVYPEEYRAAGASYTAQEFNLLNDLNNLTVNNRKLIKKEKEEIVEAIKTSNRIDVKKIIENAIHEKIDSLTGMLLDDKGKECMHKFEQYNLVRRNFEKNGLDFEKITRTDHDLIGEILTLNSDYGSILESIRDKFPDLSEKEVKVLYEIKRKNGSLFSKWQKLSLKAMNELIPDMYDESKNQMVLLTERKLIKTNRKQCMESKYINCNIAVAQIYNPVVVRSIRIAVRIVNALLKKYGNPKQIIVEMPRDKNDDEQRKKLDDMRKANERELNAIIKEIKEQYGENISDENFYYQKELALKLKLWREQDEKCVYSGKQISIKDLLYNPQLFQIDHIIPISISFDDSRNNKVLVYDIENQKKGNKTPYMYLSQLSRHWDFEQFKAYVKELYARKKIQRKKLENLLYMQDVTKYDVLKKFINRNINDTRYASRVILNLLQDYFNAYQISTTVRVIRGSFTHQMRKVLRIEKDREESYDHHAIDAILMCYSQMGYDLFYKKQSEFIDWETGEIVDELAWDKLMDSEKYQEIMYQSKYMKLRKNIAEGKEKIKYWHKVDTKPNRSLCNQTIRGTRKREGKVWKINKLNIYDQNDVKTLRNKIEKGKSSTFLMYQYDRKSWDQMIEILDLYRDSKTPFSDYEKETGDFFRKYSKSHNGPVITKIKYQDGELGSCIDISHKYGLKKGSKKVVLESLTPYRMDVYYQSMTGKYYLVGLKHSDLKFEKGQYKLNEEAYNKALVAEKVIPEGKSRNDLGMMGIEFCWSFYRGDVIEYEKNGEIKRELFWSRTMPKNSNYIETKPISAGKWKGKKQNFVGLAKTKYIKKIRSDILGNQYVCNKEKFIMEVDKSKRPAATKKAGQAKKKKDYKDDDDK

SEQ ID NO: 140 - protein, 1387 aa, synthetic construct
MAPKKKRKVMERYYLGLDMGTSSVGWAVTDEKYQIVRKKGKDLWGVRLFPEAQTAAERRTNRVARRRRQREKARIGYLRELFANEIQKTDPGFFQRLDDSKYFQEDKMIHQPFALFADSGYTDKEYFQEYPTIYHLRKELLTSTEPHDVRLVYLAVLNMFKHRGHFLNASLTDESIGNLADLFENLRIAVKDQLDVELAYPERMEDLENIFIDKSLSKTEKVEKIKALLKIDKKDRLQAELWKMICGLSGTLSVIFRQDNFSEEDKKYKLSFRDGNYDEKINAVAEMLSEESLDVLMLIKQIHDWGVLADIMRGSGKTYEYLSFARVDSYEKHKKDLETLKYLYKTYAPEKYHDMFRVMKDNNYSAYVGSVNAGNHVERRGYKHKTEDFYSALKKELQNFPESAERQYVLNEIEKGTFLPKQLTASNGVVPNQVHMKELKKILANAEKYLAFLQQTDETGLSVSEKIIQLFGFQIPYYVGPLVNKADNHAWVVRKEGGRVFPWNFEQKVDVKRTSELFIQNMVNHCTYLSDEYVLPKNSLLYEKFMVLNELNNLRINGEKISVALKQDIYQDLFKSGKKVTAKRLCDYLIVHGYVDNETPIDLSGIDGDFVNRLANYKKFSEVFYVETLTYEQEQMAEQIIFWSTVYGDSKKFLREKIQENYGEVLSSNQIKRILGYKFRDWGRLSREFLLLEGADKTTGEISTIISRMWNENYNLMQLLSSEQFTYREEVEKKTKHMEKTLSEITYEDLEDLYISAPVRRMTWQTILILKELCGVLGQYPDKVFVEMAREHGEKNTRTVSRKKKFMDLYKSCKDEEIQWAKQIADTEERKFRSKKLYLYYTQKGRCMYTGTRIELSDLFNDNLYDIDHIYPRHFVKDDNIDNNLVLVKKQVNAHKSDVFPLERDIQKKQAAMWKELRQGNFITEEKYKRLTRNDPFTEEEQAGFISRQIVETRQGTKAITDLLQQTCPQSKIIYVKAGNVSAFRQKFDLIKCRNVNDLHHAQDAYLNIVVGNVYYTKFTSSPRNFVREYRQNKEKHPYHMYRLFDYDVRRGEEVAWEIGKDGKGKSISTVKRMVLKNTPLVTMMNFEVHGGLADQTLYSAKDAKDGEGYLPLKSSDPRLRDVAKYGGFTKYTGTYFFVVEYGQEKKRIRSIEAVPLYLAERLSDRENLEVYCRDMLGYQDPKIICRKIKMYSLMKINGFYLYLTGRTGTRLNVVNAVQMILDYENMYYVKRIADASERKYTDEDYEEHEVISKENNLRLYRQLEEKHRDTIYQKRPNPMGSKLQEMEGRFEELSIAQQVKVLLEILKLSQRLNQGADLTLLGGAKKTGTSKIGKKISELQECKVINQSVTGMYVNEVDLLKKKRPAATKKAGQAKKKKDYKDDDDK

SEQ ID NO: 141 - protein, 1377 aa, synthetic construct
MAPKKKRKVMHKKLIYSISIDLGAKNTGVYFASYEERSRVDNIKSEGKVYQLDPNSYTLLLENRTAKRHQRRCFDRRQLVKRLFRVIWQKHFALMWNDETQQAISFLLNRRGFTFEPENENERHRRCYFEEIKKILTTTNYPHRYLKHFCQKLHTGKFKGLDEKKLANLIGHLNNLELKPLRWYFNDKRHSQGDYWDKNRLQEIFIHWVINTWRIDKQKDNQHDNQKEKKTNGEYNYRKLKNNLQHQEDIIEFFLTTDPKRAIPPYQDNNNRHPPRCQSLLLNRKFLDDHYPQWQMWLRDLKKLCPDPVKDFIDSLQSLMSSGDKPYFVESNSVYCQSISDLDARILQFIFDQAKDSDPFKLNEIFAYTKKLRQLQSSSQEKEQAREDIERTIESSKLSKNLKTARNYENEVFAEGSFLHLVCRYYKYRQKARAGRIFIHDTNDVFLTYCDRKPRHKKHQLLDDLASLLRVSRTRLRKVIGSNDNSTDEARVTAWLKNFTGLKSNAEKSCDEQKKYRGNIKTKIEGVYFKDQKNASLYKVCERSKKLVHAINCQLDKPKDTTLDNNPAKAIYTLSQVHNLIFKDRSGNANTCAVCSADNAQRMQEISGRAKAQRLPAINTRLIDGAVKRIAHIVGGAIADEGWKHIEQKLSQGQAVRVPIITESNRFEFEENLGVLKKKAKKYGKQPDFFVEKEKRIRRASQGVCPYTGADLDGGEIDHIIPRSSETGTLNDEANLIHASKEGNRQKSNKKYFLSDLHAHYKRKQFDSTDDNEITRWIEEQLGGDKKYEFKFGRYSNFLNLTLDQQKAFRHALYLPTNHKLRKLVIKTIDHRKQSFVNGTQRYFAEVIARNFYQKAKKLGKARQISFDYFAVEARSSTRGDGVSDYRRQLEKDDAILQKYSKDPSKKQNPYSHLIDAQIAFAIVANNHKRDGGLKLDIADHLDPEDIYKKIRLTDSNIYCDKLKRKKPTETFCSHRAFTRDTLYADHYLPILLKKETDIVCRAGFTWKNSFKFESKDNQNLQKLLPLCAHLPSGIEIAALYDKLAILPKFKEQLHRHGYYYLCVDKQKLHDFWLRGRDDTGAFSDKEFFGFCWSTIGYRTENKPIARPKDLVDILQKDAKFKVGKNECVELPVKKEWQRCLTAWQNSGKDDKEFLCFLQEYFKAAPNHKHAHQKTRNVYSLPVKTGEGKLLLRRRNWNGKHTDQIINDSDSRSVDNKPCLPVRTSEYKKAERLAWWAQTKNTVKLSTDTYHNGEHINSERWYPIECQDFPTGVKGIEYRVDDCTRPSIRLVLERSKAIVADGILKHPLCKAKEKSKAKSLIEGSTGTDVEYKASGYNREITSALQESLRKHHSKRPAATKKAGQAKKKKDYKDDDDK

SEQ ID NO: 142 - protein, 1420 aa, synthetic construct
MAPKKKRKVMRKKVEDYAIGLDIGTNSVGWAAIDCDYKLVKVNGRDAWGVVLFESANPAKDRRVFRSARRRLERRRMRIRLLQELMAEGIEPVDPNFYIRLKESSYHVGEGKYFRSNHFNLFDGGEYTDAQYFHEYPTIYHLRKRLVENKEKADIRLVYLAIHHIIKYRGHFLNEGGMDSAGGSPEVAAGELFGLLNENYKKDLFYIGKEEAFTQALLDGKSSRSMRQENAYNVLTSEKKDKFVTALTKAVTGLKANLTDLLCLEDEEDAIKDENDKPVSICFADAKYGEEKEDKYYSLERADILLAAEKLYAAIELNAVLRGKKLLCEAMVDKFRKHAEDLAAIRKLIRGMGDKALYNDFFRKGKGANYTGYIGDKRYGFYGDRGDVCKKTTKEDLYKRIREILNKAPESREKEYIEKEIIKEDFLPLITSKDNAYIPYQLNLKELDAILENQGKFYPCLAENADKIRALLTFRRPYYVGTLKGKFSWAGDIELPEEEITPWNFFKTLGEDRLDKLAENFISRMTNDCILIKGEDALPLNSMLYQKYVLLNEINKIKVFDKPISVEWKQAIYELCKKRKTVKKSDIAARLNKKFNIQTTADNIGGLSDEKKLTASLSTYVDFVKMFGEEFVKANFDALEEAVRILTIFNDTDIRKKRIKELKVFEGFEERLAKKNFSGWGKYSRKALYGTLGNNGKCVLDIMYETNEHINEVLWKEEYGFKEKFVDETEPIEKFVYEQVDRMRISPKVKRGVWNAIRLAEELAKQIGCDPKYIFLEDTTEIGEKKRTKSRYDKVCEFYKALKDGGYKDIIDEENMKYCRSELAKYKDKKSAMDEDKLYLWFIQLGRSMYSDTKIPLEKLPECEIDHIIPRSLIVDNSFENRALVLKKENQAKGDGAMSVDIVKQMRPFWKFLYDNKLIGSKKFTNLQKTEITEKDLAGFINRQLVDTGYIVRLVKELLMRRFPNAEVRGVKPKLSSTIRKRFASDHTYFNGQEYVTEKGKAGFYKIRSLNNFHHAKDAYLASVAGLFTTYSCPLWGNSEYNKAINYYIKNPEKSKYNTKGGDKESQEKANSRTTATLINKRYGFIVNLMMQTERPDLFALDEKSGEYLWDTNRYNNMLETMARNTCNVVKKKQYMAASDFYDQTVYSPKSSKKGLIPLKSHGGEDMPTEFYGGYSSLSPAYFIAVQYTKKGKVKYAFGNIPVKIAVNGTAAVDKYVREMYGDEAKVVRKIYKYQLINYEGQQVCISGNLDLQNATEIYVAPKFEELLWLVEKGKVDILSGKPDKEGEIKDFNGLIKEFIPHICYIIRRKLPLYANLVDKLEQIDKEYLDEMTMEEKVKLLSDVMLACHTGAGSATLDKRLGGESFGRIRKVIDPSKVDWIDKSLTGLYTRTTKGVKRPAATKKAGQAKKKKDYKDDDDK

SEQ ID NO: 143 - protein, 1148 aa, synthetic construct
MAPKKKRKVMNNNYVLGLDIGITSCGYGVVDLESRKFVDYGVRLFKEGTAAENEKRRSIRGRRRLISRRKTRLKDMQKLLKKNGIMSENYKSLNNIYEIRCKGLTQKLTSDELTAAILHITKHRGSVLETVEEDAEKSVDTEGLKATLQRNEQLVRSGKYICQIQMERLKEKNKIRNHGNNFSTKDYLDELKEILDHQNLNDDLKKSIVEIVLRRRKYYEGPGSEKSPTSYGRFIEVDGHIEKIDLIEKMRGKCSVYPEELRAPKMSVSADLFNFLNDLNNLTVTGNKLSTDEKESILSIISEKGNITLRQFAKKLEVSEDDITGYRIDKNNKAIFTEFKGYKKIKSILEKEGRSVSLKDYKMLDKIIEILTNKKGIEDRKDDLANADIGLNDAQIEVLANTTGIVGYHSLSFKAIRLLNKELFETEMNQMQLLHELKLFDQNRKSTKGKKNIETDDEAILSPVAKRAQNETFKVINALRKKYGEFNSIVVEMTRDKNSDEKKKRINQFQKNNENSSKDMDKFLKEAGFDPEKINGKTRMKIRLYLQQDCKSAYTFQPIDLARLIKDPSYTEIDHIIPISISLDDSQNNKVLALHSENQQKENLTPFMAFNSGKFKGMGCTYSEFKTNVLANKNIPYKKKLNLLNEKDITKLEVVKEFINRNLVDTSYACRTVLNTLQDYFKDNGIDTKVHTVNGRLTDLFRKRIHLPKDREEDFLHHAVDGLIVASIKKSNLLNGYLSKHEFSDLYDEITGEIKTIPDDKQFYDETYIRFILELKTIYEESNKYYNHLIDKADMLFYPIKISQKINTKPNRQIADETIYSTRKYDDTDYLIEKIPDIYDPKDKKCKRLVENILNGTDNIYLMSKHDPQTFQLIQDIVKYHYGQFKDDGETYKVVEKKGKKKIILNGENPLTSYKNENGFIHKYSKKGNGPAIVSMKYQSEKLGNHLDITKNYDAKNKKVILKQISPFRTDFYKCEDGKFRFVTVRYSNVKYKKSMKRYAIDKDWYAVEKEKKGIKSKDVFLFSMHRDELIGIVKKEGDKYIFDSSTESNGKTMYHDGIHPEILKFTATNNDSENRIEVKPRYTSCKKQLISSLGSMRNLKKYATDVLGTLYEVKDNKLKLEFDKRPAATKKAGQAKKKKDYKDDDDK

SEQ ID NO: 144 - protein, 1456 aa, synthetic construct
MAPKKKRKVMYNKVLCGLDIGTNSVGWCLTDENNKIIRKKGKALWGVRLFDEASDCAKRRQYRSTRRRLNRRRERIDLLRELMAEEIHRVDPTFFMRLDNSFFQKDDREEDFDYTLFNDRNYTDSDYYREYPTIYHLRKHLLESRSKEDIRMIYLALHHMMKYRGNFLSNAKEFEPMNPNDADEYFEELKQSLANTRDGVTIEYDTTKDFSRLKEVFTSEHGITVLKEKLGKILNPNNDAYIKKIVILLIAGGTIGIKDLKFDQTEDLDFKNLCVKDEKFDQYIATLLSTNEEREEEINALASCKKIYEFFLLGKLLGDQCYLSDAMVKRYQMHQEQLRELKAYVKKNHKDKYARIFRKPMRNKSKANGVEKENKKEELNNYAMYIGSNLTGNHKNRTAHCTAEAFYAFLKKELGLTKVKSTQKTKETYESQILDLMSNGEFLPRLNSTDNGVFPYQLNLMEMKEILNRQSEFYPFLLTKDEDGITVKDQILSVLEYKIPYFVGPLIPKEEGNERSKYAWIKRTDEKIRPWNFKKVVDLDETAKNFIYKMLNKCTYLPSCYCLPKDSLLFSYFNVLQILNKTSINGASMPKDFKECIIENLFRKRRKVTKKQLVEFIRAESGDNQAQITTSTGKEMEEINASLASYYDFKDIFGEEYVCSHIEEIEDMIRDIVIFEDKSILEKRLKQVYRIQDKTAIRKIKGLNYSKFSNLSKELLTDLKFYDESSERNCSVLQLLEETNQNLQEILYDETYGFQKKIEEYNKNHSGTGEFETIEEYVKELGAVSPGMKRPLIQAYKICDELEKIIGQPIDEYYVECTRTNRAEKKRTSSRYKKMQELYEEAIKTAGDDYEFKSAYEKFKSADPNQFQSDKYYLYFSQMGKCMYSGEAIDIGELYDTNKYDIDHILPQSMIKDDSLSNRVLVKQSLNRTDKRDQYPIPQSMLFNGNYREAYRFYQSLKEKKLISEEKYHRLIRKEALSEKELSSFVNRQLVSTNQAVKGFINAIRYFKTTESFTPKIIFSKSENVSDFRKKHDLVKCRSANNFHHAHDAYLNIVVGRTIDNYFAPYDPYISHDHRNSVLQEMHANGLTTNPSKIFEQNKEGTKKNITDRDGYVVWDYNQSIQKVKKTIKNRYDILTTQRTYFGNSFFGKMTIMPKGEGNISVKKGWDKQKYGGFKEYSFGSYSLIKVKDQFILEAIPTMLRKRKEEYLRERFGEYEIRLDNLKINTVFEVDKKKFVITGKTGDRYLLMNQKDRIFSSEQMETLRKIDKLFDKLNQKIGPNEEEEEERKKLRECGIKVNDADMVIAPAKNDQAKEMRITQEEAVQIYETFIQLFSKEIYSFSVINKLGCKLEGKKKEFQSLSLFKKVYLIQKINNLLRCNERKTADLRAIGFKEQEGTLTMNQKLSTCRIVFESITGFYRKVVFECKDGVECGKRPAATKKAGQAKKKKDYKDDDDK

SEQ ID NO: 145 - protein, 1354 aa, synthetic construct
MAPKKKRKVMKNYSIGLDIGTNSVGWAVINEDTYKVLKKGNNKLWGVETFASAEQAKDRRLKRSSRRRYNRRKERIKILQDIFSKEINKVDPNFFKKLEESKLENSKKNIPINGCENKNIKEYYKKYPTIYHLRKHLVNTAEKEDIRLVYLVIHHIIKYRGNFLYESDFNVNNINFINNLKSLFENCLKYNNYLEISDNINEINFDVIDKTMLNDSKNDQSIKLKKELSKIMSKNTINEFVKLLQGDKFDVIKLFSIDLEGELKVTFKDKNFDESLDKLSEHSEYEDLVEFIYNLKDIYDGITLKKLFKNSNITSLSDLMVWKYEKHQKDLILLKEVLKSNQELYDKMFSYNDTSIYRKYVLNKITSEDLKKEILGCLDTINCKEDIRTKIENDLTENNFMPRITTVENGIFPYQLNNSELKAIINNQGKYYPFLLEKWQDGKTLLERLLEFRIPYYVGPLNSKSEFSWLVKQKEDKITPFNFNEVVDIPASAERFITRMIGKCSYLIKEDSMPTNSIYYSKYKVLNELKQIKIGISGKERKLSIELINQIYNELFLKTSGTITDKKLKEYLKTNPNFDMFYNENINITGYSALNAFANNMNSYVDFFGENGIFNGTNFNIDDAEEIIKCVTIFEDKKILKQKLKDKYKSCNLERICNLKYKGWGRLSKKLLMETYGVNKNTGEAHTIMELLKETDMNFQQILFDKDYNFQEIIKDENNTKQVTKINYDLVKDLVTSPANKRAIYQSLKIIDELVKFIGYNPNNIFLEMARENSTKKRTDNRKRQLEKIYDKCKNELNNYGTLSKELERIDNKEITNKVFLYFIQNGKSLYSSEKLDLDLILSKKDNYQIDHIIPRTLTTDNSLDNLALVLHNENQNKSSNFILPEEYRTSEIIKWWNHLKKIGLLTTKKYNNLCRTSFSQEAIEGFINRQLVETRQICINVANIIDTYLNKGKKITNIVYLKSGISSGYRNKYELFKYRGLNDYHHAHDAYLAVVLGLYKKKYFKYPDDFSTIKSINKTLYEEGKFKEAKYGYFLNSLDEEYSKHYNISNSFNLKGFNETIIRTLHQNDIGVTRKTFIKNDGELFNQNPCSKEEAKVPLKKGMDIKYGGYTSLNQGYFVLVNYKKGNKFIGIPLYYTDMISRDKYIRSELKLKENETYTIKKDKIPFDTKIRWKNQCFYIKGYSNGLELANATQISFDSKAYDDYKYLLSYIFNEKDVINDREETKIDELADYVFTKALSYYPIYNKKLSKLQEKYKTLSDSNNKRIFIRELFNITGTSNTGASFKKFDLIDRMQRLSRQNPKDNCYIIYESPTGIYKNEFNIEGDNELKRPAATKKAGQAKKKKDYKDDDDK

SEQ ID NO: 146 - protein, 1534 aa, synthetic construct
MAPKKKRKVMSDKKYYLGLDIGTNSVGFCVTDETYNIIKKHKKVTYISEKKEEKNNKPNNKYYGNHLWGARLFDAASSAKDRRTSREARRRFRRRRERILYLQKEFSTERNKVDPYFFDRLNNSAIHIEDRDALLQEHHLLFNEPHFTDVEFFKKYPTIYHLRLARIEHPEQKFDIREVYLALAHMIKYRGNFLFKGTIPESGCDADRILNTFNELDSYLDEKERFCCTNEKASELLKVFQSETRVQDLHDKIQSIFPVEDKHNSFKNQRIYLIAGASRKTDAVFKDSPDIDFDIIDDEIQGVDICLGNADFEEKTLSAISEAIGDNNTKILLSLKKIFARRNIQRIIRGKKSISAAMVAIYNEHNKQLKVLKQLIKRYNPNYYSAFFRHADEIKLSSSQTNNKCSKTYKTYASYIGSTVLKGKRRRFNHDTTTPKELYSTIEYLLPISKIKPNKKGEEQNFKEKRPGDKKELLKIDTLISNDDYLLRQNSSENGVLPYQLNLNERRRIIENQSKYYPFLSNLDSDFSDPKNKCFRIESILKYKIPYYVGPLSPKATHNWVSMNNESHERITPWNFWDIVNQEKTEEAFIDFLKNYCSYLIHEPTLPKQSLVYQRFVLLNEMNTWQRNGIPLSTEDKEYLITNLYLKQRTITKLSTIEKALRIKYKTTDIKITTSGTTKGKGITDDDLHGTLSSWIDFSNEKAFGPELFHSKKIQEIAEITIKDATLFQDKKVKQERLKRFHLSPSQIKYRSNFRYKGWARLSNKLLTGIKISLPNEPYDYSILDLMWKKSLTLEEILKTKEEDNPKNYKYPFLLEIKKENGDDREDIDDILSRLHCSPKMERAIFQTIEIIKELKSTLHIKGFSEYFVETGRFTGEKKRTNSRKIKIENFYKGIEKQLSESDREGFQTLKGQLKEFTNTKLKKKKWYLYFRQLGKSLYTGKPIDFNNFENYDIDHIIPRARVKDDSFTNLVLVEKIRNKDKSNHYPFVNQYVDKEGIEFITFLNKANSKIRPDKKRNRILRTKELSNEEISGFVKSQLTTTDQSVNAVCKILNLIDKKARVVYSRASTVAEFRQLFGLVKSRDANDFHHAQDAYLNIVVGNVYDKEFSDGGVHVIAHKRDYMESLNRSVKYMFHHDERVLNKDTLIWKSKNYIIGKDGEEIEDPNSHGTIDIIRKYFSINDPLITRKMERKPTLLFSQNEIISARNGGAQFPLKQYKPFNSKGFETKYGGYSHLSNPYGMLVKSEGKNKKPIYSIEFVPSVYLGKHYSEIKVKKYLSENKKCKNPEICIKRLRFNTIIEIPCISSTGETGVLRVGLASGKTNGHQMGLINMTEPKIDNKYRCLIKSLSKLAAYDDSLIAESKDKQSSYEKYGMNDIDENPNEKIKRTDLEELFKYITEVLYKKPEFECLPKVSNTLLALETSLEEFKQLSTINQVHCLCSMLKIIQAKSVQQINFKKFADSNSNLTIFENLPKTCGDIVRNNELPSHAKIIQTSATGLTEWVLFEVPENKRPAATKKAGQAKKKKDYKDDDDK

SEQ ID NO: 147 - protein, 1418 aa, synthetic construct
MAPKKKRKVMKELNLGLDIGTNSVGWALVDENGEVIKKNGFRFWGVRMFDESKAASERRTNRCSRRRLRRRKQRIELLQNEFRDEINKVDANFFQRINDSFYKIEDKSIQNHYTFFDDFMTDQKYFEKYPTIYHLRKHLIETDEKADIRMLYLAIHHIIKYRGHFLNENETFNPTDINVIATKIDEFNNILDELSNKNEDDVEYFEKINTEKANFYVKLQEIMIAKNSKKEKESDLLTLMDIKKSTLAAQFFVNLLVYGKTSPKKYSLVKEEDYQVKDIDFSSDEYETAVEEAKKTISELSEIFDFVDEVKSIADYYYLLKLLGFNEKTNECNQSISDAMIKVYDTHQKDLKELKLLIKNYLPSKYNECFRLYDEKINNYVGYVGRLSTEGKTIRFKHCSKETFEKYIKGLLDNIKDEKVQDIILDIKKRIDNNEYMPRQNNGQNTSIPMQLNLSELKDILSKQSKYYPFLKESTDGFTTIDRIEKIFTYHLPYYVGPLSNNSKFSWVERTSDSIKPWNYEKVIDIDKTAEKFIQRMQNKCTYLHGINDYCLPKKSLLFSEYTCLQYLNKLKINGSNIDKNTKDKIFNDFFLKDKSPTKKRLKEFISSNFGEECNDLPEITCNMSSWIDFKEIYKEDFDKKKDNEIEEIIRDITLFEDKKILEKRLKEVYKLNDDMVKQIKGFNYKGYGSICRNLLELTYENELTGEVSDSIIDVMRNTNMNLQELILSNNSKYQEAIDKYNSNIDNKNDMQLDFKEYIDENLYVSPIMKRPLVQAYKIIEEIERIFKRPIDKYYIECARTNQAKKEATNSRYNHIKDLYAACSKEELKSNQIDLGNLQKKLEENQNKLQIDVIYLYFTQLGKFMYTLNNIDFDSLNNGDLYDIDHIYPRSLIKDDSISNRVLVDKNINQNKKNNLFLCQTDIVKEKQRKFYKLLVDNKLITKEKYRRLTETNVSENTLDGFVNRQLVATNQAVKGLIQVLKTFKKVKNSDIIYSKAENVSDFRNEHNFLKTRTANNFHHAHDAYLNVVIGRALNSYYEKNYIYNSNDVLKMQNDKKTLNPQRILTFSNITDKNGNYVWGIDEYTKKIEKYLYHKYDIHETTRTHTSNEMFSKTSISKAGEGTVLIKSNDKKLTIEKYGGIKSYSYCFYCIVKAVDKKNNNLYCLEAIPTPYKNNIDAYISKKCSNKYISYEIIKKQIPTNVVVKQQNLKYVITGKTKDSYLIKNVNDRFFSKKAIFTIRKIDKYFEKSKFTNLEEKNNEIEIAPSKKMKNNKMSNPIIITKLECIELIEEIKKLYSKDIYSYSQIVRLCATLQNTNFNENFNLKDLMSIIYQILLLLKTNERNSADLTMIGLKKSFGILTISRLVPKMRFVSESITGYFEELIFEVPECHLEMKRPAATKKAGQAKKKKDYKDDDDK

SEQ ID NO: 148 - protein, 1401 aa, synthetic construct
MAPKKKRKVMNLRSLSTSDKQYYIGLDIGTNSVGWAAVDEDGDLLKFKGKNTWGSRLFDSASTAEKTRSHRTLRRRYNRRLQRILDLRAFLYPDVEKVDPDFFNRMGQSSLFADDRQFEEQYVLFNGVDFNEKDYFARYPTIYHLREELVNNPEKADIRLVYLALHHIMKYRGNFLVSGEVSARNVDAEKIVDEFLNELSSLAERYDIALDVESIDAKEINDIVSLSKETRQERQHKLKKVLGFPKEADKLATALSKAVFGYKADFSKIFEVGEETESSFSLGQEDKVEIFEKSALLEDDFGLFRALQGLYRSYLLGGIIKEAPGRTISSSMVALYEKHKEDLARLKDLVKKYLPKEKYRETFKGPKYAGGTYKKAGSKGYTAYLLNNHVQNKTPEETFFSYLGSLFKNVEMDPEDREYWDDALKRMSEGEYLRKLRMSDNGAIPHQLHGEELKLIIENQSQYYPSLAENGEKIEALFSFRLPYYVGPLGSQNNPNRAKPFSWAVRKENAPQEPIKPWNFDQIIDRDATAEAFINNLTGTCTYYLGKSVIPKYSLLYSEFCVRQELNVCKAAIDGEKFNRFDVKTANEIFEGVFKRKKKVSIKDVSDFLKTELGMFNVTVTGTQDEKGFASSLTSYNDFRRILGREIETASDCEMVEKLITWVTVFEDKKILRRKITQTYGPEATGELTNEQIKAVTKLRYTGWSRLSREFLEDLRVDYEGTYVSIMDILRDSRNSRRPMNLMEILADERFHFQNLLDEANKEFLDAAYGTALDSIPGSPALKRGINQSLKIVQEIVQIAGKSPAKICVEMAKEDVGKTKGKRTRTRQRHIEECINANVDQIVKGIKDSEELKKELRENADRLDETKLYLYFLQGGKCLYSGDPLEIDELENYDIDHIIPRSLVKDNSIDNLALVTSECNRTEKRDVYPLPEAIRRRRLGVWRAMRRVGMLSEKKYERLTCANVSDKRFQHFINRQLVETRQISKQVVALLQSQYPDSKVEGIKAGLTSSLRKTYGFHKSRLVNDFHHAHDAYFACQVSRFISCRFPTMGEGLTYAAFTRYDAIMAKERYSKVGLVASQFGRDGFDRNTGEIIKDTWDAQFELERIRKCLNYKDCFISRKTEVLSGEFWKQTILSPRMKTEKAIPLKKDLDPVKYGYYKSPNSAFYTLIKCSKTLRKKDRTVVELVGIPINVANRINSTEDLQKYLETRYNKPFIIRERIPKYQLIEWDGHRYYLTSQSEMINAWQLWLPEQYIGSLEEIEPPRNEGKVLPEETTRAIWALLIKAVEKNPRYKDNLAIKLKSDSIRRKFEEASPKEKQKNVLQLIALLHCNADRGISLVSTSAGRMNSVSFESNYKHIQFVDTSVTGMYERRTNIELKRPAATKKAGQAKKKKDYKDDDDK

SEQ ID NO: 149 - protein, 1394 aa, synthetic construct
MAPKKKRKVMKGIIMNAKRSEYYIGLDIGTNSVGWAVANPDYTIPKFHGHKMWGSRLFDEAMTAEERRVHRTNRRRLNRRRDRLNILQDLFKDEIAQVDNTFFLRLKESKFYLEDKDEAIKDKNILFSDLKFTDKDFYKKYKTIYHLRNHLMNESPDDIRELYLAIHHILKYRGHFLLSGDLGISNESIADSLESIFVNLDILQPGEEFDLNLIDSILKNRDKTKSDRRKAVKKVAEEHWESNKKEQSVKNKIAQIDNIAGLALGLKADLSKLLNVPEYTDLEKAYKEICFSKGDYEEKRGDYELSIGEYIKIIDQIKTVYDSIILSSVLKDYATISEAKIADYEAHQDDLQHLKKLLKPTPSLYNAMFRDDSNKSLNNYVAYIGAYTNGKRTSTEDFYKFVKKSLAELEDSVEKERVLNRIGLEQFMPLMRSKNNASIPYQIHKVELIQILEKAASKFPFLNDVKDGLSVKEKIIELFEFRIPYYVGPLNNSNSNNAWVVRKSTGKVYPWNFNEKIDEKASAEAFINNLTNKCTYLIGEDVLPKNSILYSKFSLLNELNNIRIDGQPLPVQVKQDYIDTIFKKEHKKQTKSRILDFLKISGLIPNSIPVSVVTGLDDSIKSDLKSYRDMEKILGEGFDISVAENIIRWVTLFGEAKRILVDKIRENYPQITDEQIKKIKKLKYSDWGKLSNKFLLKIKCITPEGDENSIIDTLENTNLNLMQILAIKSCQKNIELWNQEHTENKEYKTEYDLLDDLYISPAVKRSVWQSLKIVDELVRINGSIPKKIFVEVTRTNKAEKTKKDARQKRLLDLYQAIGKEGAEWKEQILNYNAGDFRSKKLYLYYTQMGRCMYSNELINIDRLFTNDYDIDHIFPRSVTKDNSWDNLVLVKSVENRKKTDTYPLPIELQNRNKEWWRMLRQYSFISERKYERLVRKEELTVEELSGFIARQLVETSQSTKAVTQLLKKIYPDTEIVFSKAENVSEFRYKNNFVKVRELNDYHHAKDAYLNIVVGNVYHEKFTKDPSNYIRNVYDRFNSINDRRKRLSMNHIFVHKLERHNTTIWDPSISMPIVIKMMESNDVRVTRKLTIQKGVLYNASITKANKAKFDSNFPLKRGDQRLLDVSKYGGYENIYNAYYSVFRFIDTKLKKESVNLIAIPIYVLNSLNSNDDYILYAKSTISNRNNYDQIELLYKKLPINSLVRINGFDYYIGGKTNNNVCIDSAISVVLNSSDLLYLKSIIRVVNSDIPEHVFKMDDSLSKDANLRFYRSLVSKMKQSIFIKKSKNKFRELEQDSCICKFITLTEIEQCYVLLDLLNMLTNKKTTYDKLNKCLGVSMSRSTQGMNLSNLNEFTIKEQSVTGLYCKDVKLIKRPAATKKAGQAKKKKDYKDDDDK

SEQ ID NO: 150 - protein, 1380 aa, synthetic construct
MAPKKKRKVMEDWYLGLDMGTNSVGWAVTDEAYCLLRKKGKDLWGVRLFLEAETAQGRRSNRVSRRRRRRETVRIGYLKELFSEAISQVDAGFYQRLEDSKFFQEDKREHQPFALFADTAYTDRDYFKEYPTIYHLRRELLYSKEPHDVRLVYLAVLNMFKHRGHFLNATLSDGNGGNIKELYGQLQEGFSELYDKEMAAIRDAEELQKLLTDKKYTKSGRAEEVRKYLNIDKKDKAQCEMWKLVCGLQATLPVIFEGEEFSEENLKYKLSFDDGKYEEKAAEVEGMLSEDAFELFLLLKQIHDGVILSDIMESYHYLSEARVASYEKHKEDLKRLKKIYRLYAPEEYDSMFRTMEDNNYSAYAGSFLTGGEKQRRGGKHKTEEFYARLKKKIVTFPETGDSRYVLDEIEKGTFLPKQLTASNGVIPNQVHLAELKKILENAENYLEFLKTKDEGGLTVSEKIIQLFSFQMPYYIGPLIQTENNHAWVKRKEMGKVYPWNLEQKIDVKETAEAFIYNLVNHCTYLSDERVLPKNSLLYEKFMVLNELNNLRINGEKISVELKQELYQALFKNGKKVTGKRIKTYLLNRGYVSKEMPVELTGIDGDCVNRLANYKKFLEIFEVDTLTYAQEQMAEQIIYWSTVYGDSRKFLGDKIEEEYGKVLTPEQKKRILGYKFKDWGRFSREFLFLEGADKETGEIDTIISRLWNENYNLMQLLGDELFTYKEEIEKRVQKIDKTLFEIEYEDLQELYISAPVRRMTWQTILLLRELCSVMGSYPNKVFVEMAREHQEDKKRTVSRKRKFEELYKKCKGEEREWLAEISGTEESRFRSKKLYLYYTQKGRCMYTGEQIELSNLFNDNLYDIDHIYPRHFVKDDNIDNNLVLVKKESNAHKRDVFPLEPGIREKQNDLWKMLLEGGFITKEKYFRLTRNDPFTPEEQAGFISRQIVETRQGTKAIADLLQKGCPDSDVIYVKAGNVSDFRHEFNLIKCRNVNDFHHAQDAYLNIVVGNVYDTKFTKSPRRFIEAYRKDPEHNKYHMDKLFDFDVKRGNVVAWEVGKSIGEVKKTFRKNSPLVTYMNYEAHGGLADQTLYSAKAAKLAGGEGYIPLKASDERLKDTTKYGGFKKYTGCYFFVVEYTVKGKRIRSIENMPLYLKKELNSREKLEQYCMEVLKYAEPEIICERIKMYSLMKINGYYAYLSGRTGNQLILVNAVQLVLSYDWMLYVKRINDAVERGYSEEQLEYQGEITREQNLKLYRELTGKHMGTIYGKRPNGIGKFLVENEEKFEMLSIQQQLSALLEILKVSQRTSGGVDMTMLGGAKKAGVSLISKKISDLKECKVIHQSVAGLYVSETDLLSLKRPAATKKAGQAKKKKDYKDDDDK

SEQ ID NO: 151 - protein, 1348 aa, synthetic construct
MAPKKKRKVMSEYYIGLDVGTNSVGWAATDTAYSLLKYRGNAMWGVRLFDDANDASERRSSRTARRLHARSKQRLALLELLFSEALAEKDPLFLTRLAESALQEQDRSSASCRYALFNDPDFTDREYFKRYPTAYHLRSELIHSTAPHDIRLVYLALHHIVKSRGHFLFDMDTDGEYKGVREIFDELCVLLEEQYDTACPVSDTDAFLELLQNDSMGITDKKKALKPLVGKNAADMVDGYVLCCALVGATVKCADLFCDETLKDVDIPSLRLRDDLDENYDRFADALSDRMDLVVAMKAVFDAALLSKILGKAAHTGDETAYISDAKVQQFDENRADLALLKRYVRSACPEKYGYIFRKKKDKLNNFAAYGKRSIASGEYTCKQEDFCKFLKKELPAPSEAAYAALFAKIENGTLLPKLRGADNSVIPHQLHYRELKKILENAAGYLPFLQQADADGLTVTDKILSIFSFRIPYYVGPLNLKSPNAWVVRTEEKITPWNFEKVVDTQKSAESFMIRLIGKCTYTGEAVLPKDSLLYSEFAVLNEINLLCLNGTPLPADIKNRLFQDLFVQSNARVTKKKIKQWLLMHGLAKETDEVSGVDNIIKANLKSYHDFKNILCKVPHAEIVEDIIKHILIFGEDKKMLRRWLKASCPFLDEQDTAYVLRLRYKDWGRLSRTFLTEIYTPDENGEALSVMDMLRATNKNLQQLLTDDYDFAKQAEEYRSLKFGVGGSLDEQLQDLYISPRIHRSIRQTLKIVKEITAAEKCAPKKIFLEVARGTKEDLKGKRTVSRKDNLLQLYKACKEEHGELAAALAAEDEGRLRSDALYLYYTQFGKCMYSGESIDITKLKSDYDIDHIFPQSRVKDDSLDNRVLVKRELNNDKKNIYPISADIRTNMQPFWHMLKEKGLISPRKYERLVRNTPLTEAELSAFVSRQLVENRQSTKALATVLKRYYPDTRLVYSKAMNVSDFRHEQELVKCRDINDLHHAKDAYLNIVVGNVYDTKFTAAFFKNILTEEYSLNKVFERDVRGAWQKERDLAKVRSVMKKNNILVTRMPHEKKGKLFDLQILPKGKGQLPVKVDRSIENYGGYNNVSGAHSIVVEHDGKKGRVRTIEPVYIYQKALYEQDPLRYCREILGLSEPKIVADRILFDTLLELNGKRIYITGRSGNYLCGKHPYQLAIDSDSEKAIKDIKKYVDRCAEKKAVLPITEHDGISAETNLRLFDLFIAKFHAPVYAAYFTNLCNFCEQHREDFIALTPDAQCHLLLEILKAFKCDRTASDLSVLGGPKNAGILMMSKTISTCRTAYVIHHSPSGLYETKVDLLRPKRPAATKKAGQAKKKKDYKDDDDK

SEQ ID NO: 152-160 - skipped (9 entries)

SEQ ID NO: 161 - DNA, 3138 bp, synthetic construct
  source 1..3138: mol_type = other DNA
atggggctcatcctggggctcgacctcggggtgagctccgtgggcttcgggatcatcgaggaggacacgtacaacatcgtggactacggcgtccgcctcttcgacgaggcggacgccaacaacaacctgaagcgccgcacgatgcggggcgcgcggcggctgaagagccgcaagcgcaaccgcatccaggccctcaagtactacctgtgccagatcggcctggtgaacaccatcgacttcgagaagctcaacaacgtctacgagctccgggtgaaggggctcaacgagaagttgagctccctggagctcgtgaacgtgctggtgaacatcgccaagcaccgcggcgtcgcctacgacatcgcgatcgacgagaaggacaaggaggccgaggccctgtcctcggccctgtccctcaacacgaagtcgctgagcaaccagcagaagtacgtctgcgagatccagttcgacaagctgaagaacggggagaagctgcggacgacgaacaacctctacaagtcctgcgactacgagaaggagctgcggaagatcctctcgaaccaggacttgaagccggaggacatcgagaagatcgtggacatcatcttccggaagcgggagttctcggagggcccggggagcgagaagttccccacgccctacgggagctaccgctggatcgacaacgtgctccagcacgtgaacctgatcgaggtgatgcggggcaagtgctcgatcttccccgaggagtcccgcatcgccaagtgctgctaccaggcctgcctgttcaacctcctcaacgacctgaacaacctcaccatcctgaagaacggggagaaggtgaagctcacgaaggaggagaagcagaacgtgatcgacgtgatcaacgagaagggccacatcacccccaagcagctgatgaagaagctgggggtggacgaggagcacatctcggggttccgggtcgacaagaacaacaagcccctgctgaccaccttcgacatctacgagaagatgttgaagctggagctcaacagcgacttcatcaacgacaagaacgagatcgaccaggtcatcgaggtgctcaccaagacgatcgtggtcgggaagcgcatggaggagctcagcaacctcgacatcaagctgagcaaggaggagatcgagaagctgagcaccctgaccaaggtcaacgggtaccacagcctgagcaagaaggcgatggacatcctcatcccggagctcctgagctccaacttcaaccagatggagctcatccacaacaacaacctgttccagaacaagctggacttcagcacgaagaacatccccttcgacgactcgtcgatcctgagcccggtcgccgtgcgggtgcacaagcagaccctgctcatcgtgaacaagctccgggaggagtacggggagttcgcggcgatcgtcatcgagacgacgcgcgcgaagaactcccaggaggagaagcgggaggagatcgagaagcagaagaagttcgaggacgccaagacgatcacgaacgagttcctcttcaagaagggcctgaacccggagaaggtgaacaccaacaccaagctgaagctccggctgtacaacgagcagaacgggaagaccatctactccggggagaccatcgacctggacctgctgctcaacgacgacaaggcgtacgagatcgagcacatcatcccgttctcgatctcgttcgacaacagcctgaacaacaaggccctggcctcccaccaggagaaccaggacaaggggaaccactccccgtgggggtacttctcgagcggcaaggtcgaggggccgaacgactcctgggagaagtacgtggccttcgtcaacgtgctgaacctcaacccgaagaagaaggagaacctcctgcggcaggaggacatcaccaagtacgagaaccggaagtcgttcatcaaccggaacctgaacgacacctcgtacgggatccggacggtgatgaacaccctgaagtcctacttcaaggccaaccagatctcgaccaacgtcttcaccatcaaggggaagatcacctcggccttccggggccgggtcggcctcaagaaggaccgggacgagtacatccaccacgcgatcgacgcgctcatcatcgcgtcgttcaagaaccagaagacgttctacgaggccttcgagctcgggaccaccgagcagggggacctctaccacctccagacgggggagctgttcgacctggagaaccccctggaggacagcaagctgctgaagttcatcagcaacctgaagaacatccacgggatccccaacgacttctcgtacaaggtggacacgaagacgaaccgccagttctcggacgagaccatctactcgacccggaagtacgaggacggcgagtacgtcatcaagaagtacaaggacatctacgggaaggacgacggggagaaggtgaagaagctgttcgagaagaacgaggccacgaagctgctcgtctaccggaacgacaagcagaccttcgagctcctggagaagatcgtgaacgcctactccaacgagaagaacccgttcgcgaagtacaaggaggagcacgggtacatccggaagtacagcaagaagggggacgggcccatcatcaagcagctgaagtacgtggacgggaagctggggaactacctggacatcacccagaagtaccccaagaccaacgacaagaaggtcgtcctcctgcagaacaccccgtaccggacggacttctacatctcgaaggagggcttctacaagttcctcaccatccggcgcttccacatcaagcagatcgacggcctgaacgtgatcgactacgacctctaccagagcctgaaggagaacaagaagatcacgctcgacgacgagtacctgttcaccctgaacaggaacaacatcatccacatcgtgggcgagaaggacgagtacttcaagttcatcgccaccaacaacgacatcaagaacatcatcgaggtgaagcgcatcgagcggctcaccgagaagcagatgatggtgtcgatcgggaagaaggtgaagaagatcgagaagtacaacgtctcgcccatcgggaagtaccagaaggtcgtcaaggagaccctgaagctggtgtggaagtga

SEQ ID NO: 162 - DNA, 3330 bp, synthetic construct
  source 1..3330: mol_type = other DNA
atgtcgaagctcgccatgggcatcgacatcgggatcacctcggtgggctacggggtgatcgacctcgacgacgggaagttcatcgactacggggtccgcctcttcaaggaggggaccgccgaggacaacgagaagcggcggaacgcccgcgggcgccgccgcctcacgtcccggcggcacacccgcctccgggacatgaacaaggcgctggagcagttccagatcaaggggtcggactaccaccccttgagcaacgtgtacgagctccggtgcaaggggctgaaggagaagctcacctgcgacgagctcaccgcggtgatcctgcacatcacgaagcaccgggggagcaccctggacgtggtggaggagaacgaggcgaagaacgccgacatcctctccaccaaggagatcctccggaagaacgacgaggagatcaagcaggggaagttcatctgcgagatccagatggagcgcctgctgatgaaccacagcgtccgggggcacgccaacaacttcacgacgaaggactacgtctcggagctgcaggagatcctgaagcaccaggacctgtccgccgaggcgatcgacgcgatcatcacgatcgtgcagcggcggcgggcctactacgagggcccgggctccgagaagtcccccacgccctacgggcgcttcatcgaggagaacgggggcgtggtgcagatcgacctcatcgagaagatgagggggaagtgcagcgtgttcccggacctggcgcgggcgcccaagatgtcgatctccgcggagctcttcaacttcctgaacgacctgaacaacctggtcgtgaacggggagaagctctccgtggaggcgaagcaccagatcttctccatcgtgaacaagaaggggaagatcacgctgaagcagctcgccaagtgcctccaggtggaggagagcgacatcaagggctaccgcatcgacaagaaggacaaggcccagttcacggagttcaagggctacaagaagctcaagcagctctgccaggaggacgggctggccgtgtccctccaggactacgagatgctcgacgagatcatcgagatcctgaccaagaagaagggcatcgaggagcgcaaggaggcgctcaagggctcggtgttcgggatgtcggactacctcgtcgacatcctcgccgaggccaccggcatcaccgggtaccacgccctgagcctcaaggcgctccggatgctgaacaaggagatgttctactccgagttcaaccagatgcagctgctccaccagctgaacctgctgaaccagaaccggatcagctacaaggggcagcggaacatcacggcgaacgccgacgccatcctctcgcccgtggtgaagcgggcgcagaacgaggcgttcaaggtcatcaaccagcttcggaagaagtacggcgagttcgacaccatcgtcatcgagatggcgcgggacaagaactcgaacgagcagaagaagcggatcaacgacatgcagaagcgccgggagaagtcccgggaggagatggacaagatgctcaaggacctgggctacgacctggacaagatcaactcgaagatccgcatgaagctctcgctgtacgagcagcaggaggggaagtcggcgtacaccttccagccgatcgacctcaagcggctgatcaccgacccgaagtacacggagatcgaccacatcatcccgatctccatcagcctcgacgactcccagaacaacaaggtgctcgccctgcagtcggagaaccagatgaagagctacctgacgcccttcatggccttccaggccaacaagttcgccgacatgacgtacccggagtacaaggcccgggtgctgtcgaaccccaagtacagctacaagaagaagatgaacctgctgaacgagtccgacatcacgaagatggacgtgaagaaggacttcatcaaccggaacctggtggacacgcggtacgcgtgtcgggtggtgctcaacaccctgaaggactacttcaaggacaacgagatccacaccaaggtgcacacgatcaacgggcagctgacccacctgttccggcggaagagccacctggacaaggaccgggaggagaacttcctccaccacgcgatcgacgcgctcatcgtggtgtcgatcaagaagctccagctcgtgaacaactacctgttcctgagcgacatggagaaccaggggaacggcgggaacgagaccacgtcgtcgatcccgtcggacgagcagttctacgaggagcactacctccggtacatctcggacctgcggacgctgtaccagcagtcgtcccagtactacaaccggctgatcagcctgtccgacatgatgtacgccccgatcaagatcagccacaagatcgacacgaaggcgaaccggcagttcgccgacgagacgatctacagcacccggaaccgggacgggatcgactacgtggtcgagaagatcccggacatctacgaccccaagtcgaagaagtgcaaggcgctcgtggagagcatcctcaaccacgacgaccagaagtacctcatggcgcggaacgacccgcagaccttcgcgatcctcaaggagatcgtgcagaaccactacgtgatgtacaagcaggacgagacctggtacggggtcaagaacggcaagatcgagctcaagggggagaaccccctggcgggctacaagaaggagcacggcttcatcaagaagtacgccaagcggggcaacggccccgccatcgtctcgatgaagtacgagagcgagaagctcggcgtgcacctgctgatcagccggaactacgacctcaaggacaacaagaaggtcgtcctccggcagatcagcccgtaccggacggacttctaccactgcgacgacgggaagttccggttcgtcacggtgcggtacgcgaacgtgaagtacgacaagaaggagaagaagtacgtcatctccaagcagtggtacgaggacgagatgcagaagaagaacatcaagtcgacggacgagttcctcttctcgctccaccgcgacgagctcatcgggatcatccggaagcagggcgactcgtactactacgacgcctccaccgaggggaagggggacaagcagtactccgacgggatccaccccgagatcctgaagttcacggggaccaacaacgacgccaagggcgtcatcgaggtcaagcccatctacgcctactgcaagaagcagctgatgcccagcatccagagcgtggtgggcttgaagaagttctcgacggacgcccttggcaacctctacgaggtgaagaagaacaccctcaagctggagttcgactga

SEQ ID NO: 163 - DNA, 3456 bp, synthetic construct
  source 1..3456: mol_type = other DNA
atggacaagaagatcaaggtcaacatcggccttgacatcgggatcacctcggtggggtggtccatcctcgacgaggacaacaacatcctcaagctgggggtgcggctcttcgacgacgtcgccaacgagaaggacggcaagctggacaacgtccagcgccgggagtgccgcacccagcggcggcgcatccggcgggcccgcacccggaagcaggcctacctgaactacctggtgtcccagaactggttcaactcgtacgacgaggccgtggagttcatcacgaacttcgacctgatcaagttcgggtacgacaaccccatcgagctccggatccaggccctggagaacaagatctccaaggacgagctgatcttcctgctcttccactacctccaccaccgggggtacctgtacatcacggagtcggacgccgacaagctgaacgagaacgacgagaacaagaaggagttcccgtcgctcaagatctacaagttctacaagaactacgagtactacaagggctcgatcgtcagcgacaactcggcgtacgacttcgcgaacgagatccggcagatcctcaacatccaggggatcgacgagaacttcgcgaactactacatcaacgagctgttcctgaagcaccgggactacagccaggggccggggtccgagaagagccccaccccctacggcatgtggtactgggacgacaaggagcagaaggtgaccaagcgggagggggactccctctgggactccctcgtcgggaagtgctcctactaccccgacgagaagcgggggctggccaagtccccgatcgcggagatcttcaacctgctgaacgacatcagcaacatctacttcatcaacaacagcaacatcaagctgacggaggacgagcggaacaagatcttcagccagtacaacaacagcctgctgaagaccaagtccttcaacctgaccccgaaggagctgctgaagatcctgcagctcaagtgtcaggaccagaacatcgacgagtccgacatctacgggtaccgggtggacggggacaacaagaagatcatcacggagctcaagaactactgccagatcatccggtgggccaaggagtacctcgtcaacaaggacgagatcaacctgttcaacctggagatcctgaacttcgcgaacaacatcttcgtggagctgtccaagacgcaggacctcaagaagcggctggagatcctgaagaacatcaagtccaagctgctgaacgagaacaagttcacgaacatcgactccgacaagtcctacaacctggacatcaagctcatcaagggcctgaaggggctcacgaagacccacaccctcagctacaaggccatggaggagttcatcaagttctcgctgtccaacggcagcgagaacttgaactggatgcggtacagcaacttcaacaagaacctgaacaacaccaaccagaagaagtcctccaagtacctgaagaagatcgaccgcgaggaggtgatctcgcccaccacccggcgggcgttcaaccagacgatcaacgtcctgaacaagatcctcaagctgtactcgaacgagtacgagatcaagaacatcaccgtcgaggtggcgcgggacaagaactcctgcgaggagcggaaggtcatcacctcctcgcagaacaagaaccggaaggaggtcgaggagatcctcaagaacatcgggaacaagaagttcgaggatctcaacgcggcccagatcctccggatcaagctgtggaaccggcagcgccagttcgacatctacgactcgaagctcggcgagaacgagtcgaagatctcgttcgacgacgtgatcaacgggaacaagctggacatcgaccacatcatcccgtacagcatctcgcaggacgacagcatcaacaacaaggtgctgacccgccgggagaacaaccaggtggacaagaagcagcagaccccctaccagttcttctcccagctggggaagtgggacgactacaaggagaagatcgagaagttcttctccgacaagctgaaggagaagtggatcaagaacctgctgtacatcgggaaccccctgacggacatcgactcgttcgtcgggcggaacctgagcgacacccggtacgcctcccggctggtgctcaacgtcctgcaggagttcttcaagaacaacaagaactacgggaacaccaagatcaaggtgatccggggcgggatcaccaacttcgcgcggtacaacctcttcaccaacggggcggggaagtccctgatcccgaagaaccgggacatctactgccaccacgcgatcgacgcgtcgatcgtgtcctacctggggtccaaccacaacatcaagctcctgctgaaccacgcccagcaggagtacaacgacctcaagaagaagaacaacttcgagatcgacgaggacaagcgcctcgtcaacaaggagaccggggaggtgatcgagtcgtggtacgccaagaacggcgagtcccggctgttcgccgagcagctgaagcagtacaacacgatctacaacaagtccgaggggtgcctcatccccgggtccaagagcaacgagatcaagttctcgcggatgtacatcaacaagaacaacgtccagctctccaacgagacgatctactcgttccggttcaagaaggacgagaacgggaaccagctggacgacgggatcatcatcgactacatcaaggtcctggagtccaagacgtccgacctggagaagtacttcatcgacgagaagatccaggagaaggacctggagaagctgctctgctacaagaagaaccccaagctctacaacaagctgaagatgatcttcaaccgctactacaagagcggggacaacaccaaccccttcatccggtacatggaggaggagtgcaagatcgagaagccgaagtggatccaggtggggaacctccggatcaacaagctccggctgatcggcgagaccaagaactcgaactcggtgatcatcttgaacaagcacaacaagaaggccatctacaagagcttgaagttcctcttcctgcggatctacaaggacaacaacgacaagtaccggctgatcgggatcaaccagaaggtcctgacctacgacaagaagaagtcgcagctgaagatcgacaagaacaagctggacaaggtgctcgagctgaacaacatcttcaactcggagaagtacatcgacatcaagcgggggatgatcttcgtccgcaaggaggacaacaagctcttctggtccatcgggggcgggaccctgagccagaacaagctggagctgaagtccatcaacacgagcaacgagatctcgaacctgggcaagcagttccagcggagcttgtccaccatcgtggcggagtacgacatcgcccaggtggacgagctcggcaacatctacaaccggcggaagatcgagttgtga

SEQ ID NO: 164 - DNA, 3798 bp, synthetic construct
  source 1..3798: mol_type = other DNA
atggacatcgggacgaagtcgctcgggtggtccatcatcgggaagaacaaggagaacaacgagtgggacatcatcgacttcggcgtccggatctgggacgccccggaggtgtccaagaccctggacacctccgcgaaggtccggcgggaggcccgctcctccaagcggatgttccgccggcgccgcgcccggatcaaggacctgaaggactacctggtgaacgagctgaacctgatctcctacaaggagatcaacgaccacttcgacaagctcaaggagaagaacgactactccgtgaccaacaagaagtaccggaacgacatcaacccgctgttcctccggtaccgggccatcaagaacgaggagaagctgacgtccctgcagctgatcatcgtcctcctgtccttcgccaagcggcgggggtacgagaacaagttctcgttcgaggaggacaagggcgggtacgggtcctcctcgaagaagttcatcgggaagaccgaggaggggaacaagaagtaccagttccccatcctcgccatcatggaggacgacttcttcaagtcgaacaacatcgggaaggagcaggagtacttctaccggaaccggaagaacaacaagatcaacaagtccgacaagaacaaggaggtggagcgggagcagatcctcttcctgacgaaggacaacaaggaggagctccggaagatcctcgcgatccagcagaagttctacctcgagctcaccaacgagcgggtggacttcatcctggacgagatcatcttccggaagcgcgacttcgaggacggcccggggccgaagcaggagaacctgaaggagagctggaagaacagcctcaacaagatcaactactacaagcccttcatcgagaacgtgggcaagtgccggttcgtggagggcgagtaccgcacgaacccgttctcgatcctgggcgacctgttcctgatccagaactacctggggcaggtcttcccgaagaacgtcctcaaggtgaagaagatcgacaacatcaccttgaagaagatcgccaaggagatcatcaacgagtacctgaacaacttcgtgctcgacgagaagatcttcaccaagatcctcaagaacaacaacctcatctactcggagttcgacaacttcaagaagatggagaagaacaacccgctggagcagctgttcctggcgtccctggcgaagatcaagcagcccttcgccttcaaggagacgctcaaggagtacctctccagcatcaacctgaacgagctgtcgttcgacgccttcgagaacaacccgatcaacaagctcgggaaggtcctgtacgagaacaagaccccctcccggatcgtgaacaagatcaaggagctggagatcaagaacctgaaccccgacgaggtggagatctggatcaagaagttcaacgaccagttgaagaaggtcaagaaccggaccttctcggtgtccagcaagcacatcttcaacgccctggagaagctcctccaggaggggatcatcatctccgagtaccaggcggagctggagaagaagcagaagcaggaggcgatcaacaagatcgagaacaacaactccaacaacttcctgtcgctgcccaaggaccaggacatgaagaagaacgccgtcgtgttccggtccatcaaccagacccgccgggtgctcaagcagatcttcaagacctacgggcccatcgagaccgtggtcttggagactgccggggacctctacaacgagatctccgtgcggaagcgcatctccaaccagcaggagagcctggtgaaggagaaggaggagcgctcccggcgcctgaaggcgctgggggtgaacgtcaccggggcgaacgacctgaagctgcggctgttcgacagccagaaggatctcaaggagatctccaagaagaacgtgcggtcgatcgacccgtactcgctgtacaaggacaacatcgagtacatcaacgagcgggacatcttcacctcgaagtacgaggtggaccacatcatcccgtactccaagtcgaacgacgactcgctcgccaacaaggtgctggtgagccgcacgaacaaccagctgaaggggaaccggaccccctaccagtggatcaccaacagcttcggggagaaggcgttcgacaacttcaagaagaacatcaagacgtactacttcaaggggaacaagaacctcgggaagttcgcgcgccggaacgagaacctgctgaagaagaacttcagcagggagtcgtacctggagaacgagaccgcgaagatcaacgacacgcggtacatcacgagctacatcgccaactacctggagctcgagatggagaagtacaagcggatcaacggcctgaactacacgccggagatcatcacgctcaacgggaacgtgacgagctacatgcggcgcgtgtggctgtcgaacgacaactggggcaacttcctcaagccccggaacatcacgccgttccaccacgccatcgacgccatcatcctggcgaacctgttcgacaagtaccaggccttctactcgaacctgatcctccggatcgagaagttctactgggaccagttcaacttcgtgaagaagcacgacatcgacttcgagacgacgaagtcgttcttcgagaactaccagaacatcatcgagtaccagatcaagttcgccacccggtacttcaagaccgaggaggtcgaggaggagacgatcaaggcggcgaagatcgccaagcagaacaagatgatcgaggaggtcaagctcctcttcgagtacctcctcatcaacatccaggagaagaacgtgctggacttcaagaccgacccgaacatcaactacctgttcgccccgatcgtgtccaacctcgacgagaaggtcgagaacctgatccccatcaagatcagcatcaaggaggaggtgatcaaggaggacatcaagcagaccaacatcgaggcgaacatgatggacatcccgcaggacgaggtggacaacaagcgcctgtccaacacggacaagaacgagctgcggcggaagaacatcatcctcgaggagatcgtctccccgcaggactgggcgcagaagaacaaccgggagatcaaggatttcccgtacatctcctacaaggagaactacaagcgctcggggaacttcgccaaggcgaaccccatcaagaaggaggtggtcctggggaagatgatcgacttcctcatccaggaggagaaggcgcaccagaaggaggtgaagaccatcgggatggtcgacgccaagcgcgagatcgccaactccaaggcccggatcgtcgacctgcaggagcagctgaagacgaagaactacctgtccctgacgaaggagaacatcgaccggcaggggatctacgtcttcagcggcgagaactactacgagacgtcggagtacctgggcctgcgcttcaacgaggagacgcacaagttcgagaagtacaacctgttcaacgccatcaagaacgggaagaacaagcagaacaagaacgagctgctgatcgtgcggaacacgaccttcaagttgaaggacgaggactggttctacaactacaagggcttctcgggcgtggggttcgccaagagccccaacctgctgtactacagcagcgtcccgacgctccggatcaccttcaaggagagcgacaaggtgtcggagcacagcccgatcatctactcgatctcctccctgatcaacaagatcgaggggatcgtggagatcaacaccctgggcaagtaccaggggatccggaagctcacgaacctgtga

SEQ ID NO: 165 - DNA, 4014 bp, synthetic construct
  source 1..4014: mol_type = other DNA
atgaaggactacttcatgggcctggacatggggacgggctcgctggggtgggccgtcaccgactccagctactgcctgtgccgggcccacgggaaggacctgtggggcatcaagctgttcgagtccgccaacacggcggaggagcggcgggtgttccggtgcgggcggcggcggctggaccgccggaaccggcggatccagctgctgcagcagatcttcgccgaggagatggcgaaggtcgaccccgggttcttcctccggctcaaggagagccggtacgtcccggaggacaagcgggacctcaacgggcagacgcccgagctcccgtacgccctgttcgtggaccagagctacacggacaaggacttccaccgggactaccccacgatctaccacctccggaaggagctgatggagtcgtgcgaggccaaggacatccggctggtgtacctggccttgcaccacatcatcaagcaccgcgggcacttcctgttctccggcatcgaggcggacaagatcaccgacttctacgggaccttcacgaagttcatccaggtcctgaaggagcaggagctcgagttcaacctcgagccggaccgggaccagtgcgtgcaggccaaggagatcctggagaacccgcagctgacgaagacggccaaggccagcgggctcatccagaagctccaggccaagacggactgcgagaaggccgtcatgcggctgctcgcgggctgcaaggtgaagctgtccgggatcttcgaggacaaggcctacgacgagaccgagaagccgcagatcagcttctcggaggccgggtacgacgagtacgaggagatcctggagggcgtcctgaacgaccagttcatcgtgatcgccgcggccaaggcgatctacgactggtcgatgctcgtccacatcctgggcgacgcccggaccatctccgaggcgaaggtcaaggtgtacgagaagcaccggcgggacctgaagatcctcaaggacatggtccggaaccacctgtcccgcgaggactacaaggagatcttcgcggtgacggacgagaagaagaacaactactgcgcctacatcgggatgaccaagagcaacaacaagaaggtcccgctggcggggaaggagtgcagccgcgaggagttctacgccttcctcaagaaggaggtggtggatcggatcgaggacaagtcggtcacggagatgctctcccaggagatcgagctggggaccttcctccccaagcaggtctgcaaggagaacggggtgatcccgtaccagctccaggaggtggagctgctcaagatcgtgaagaacgcgggggagtacctcccgttcctcaaggagaacggggacaagatccagaacatcctgacgttccggatcccgtactatgtcgggcccctgaacgtggtgaaggaggccgaccactccttcgcctgggccaagcggaagtccggggagcccgtgtacccctggaacttcgaggaggtcatcgacgtcgaggcctccgcggagatcttcatccggcgcatgaccaacaagtgcacgtacctgccctcggaggacgtgctcccgcgggagtccctcctgtacagcaagttcatggtcctgaacgagctgaacaacctgcgggtcaacggggagaagatctccgtggagctgaagcaggacctctacgagaacctgttcaagcggtaccggaaggtgaccgtgaagaagctcaagaactacctgatccaggagggcatcgtggagaagggggtcgacctctccgggatcgacggggacttcaaggcctccctgaagtcctaccacgacctcaaggagaagctcaccgggctcccgctgagcgagacggagcaggagcagctcatcctgaacgtcacgctcttcggggacgacaaggccctcctgaagcggcgcatcaagaagatgttcagctcgctcacggagggccaggtcaaggggatctgcgccctgtcctacaagggctgggggcggctctcccggaagttcctggaggaggtgatctccccggtccccgagaccggggagatcaagaacatcatcggggccctgtgggagaccaacgacaacctgatgcgcctcctctcgaaccggtacgggttcctcgacgccatcgacgagctcaactcggacgggcagaagtccgagctgacgtacaagaccgtcgagcagctctacgtgtccccggccgtcaagcggcagatctggcagaccctgaaggtcgtcaaggagatcaagaaggagatgggcggcgacccgcggcgggtcttcctcgaggtggcccgggagaagcaggactcgggccgcacgatgagccggaagaagaccctccaggagctctaccggaagtgccaggaggaggagcacgactggctcggggagatcggcaactgggacgagcacacgctcaagtccgaccggctctacctgtactacacccagaaggggcggtgcatgtactgcgggaagcggatcgacatccagaacctgtgggacaagaacacctacgacatcgaccacatcttcccgcagagcaaggtcatggacgactcgctgcggaaccgcgtgctcacctgccggacctgcaacgcgaacaagacggaccactacccgctgcacggggacatccggcagaacatgaagcccttctggtccaacctgaagaacacggggctcatcgacgaggagaagtacaagcggctcatccgggccgacgagttctccccgtcggagctggccgggttcatcgagcggcagctcgtcgagacccggcagtccaccaaggccgtggccgacatcctcaagaaggccatgccggacacggagatcgtgtacgtgaaggccaagacggtctccgcgttccggcagcagttcgagctcatcaaggtccgggagctgaacgactaccaccacgggaaggacgcctacctgaacatcgtggtggggaacacgtacttcgtgaagttcacgaagaacgcgtcctggttcatcgagcagaacccgggccggtcctacaacctcaagcggatgttcgagttcgacgtggagtccaagggggagaccgcgtggaaggcgggctccaaggggacgatcaacatcgtccgcaagatgatggagaagaactcgctgctgttcacccggcggtccttcgaggtccagggcgggctgttcgaccagcagctcatgaagaagggcaagggccaggtgcccatcaagagcagcgacaagcggctgctctccatcgagaagtacgggggctacaacaaggccaccggggcgtacttcgtggtggtcgagtccgaggggaagaagggcatgatgaagcgcacgatcgagtgcgtgcccctctaccgcaagaaggagctcgacaactccgaggagaagctcctcgagtacctcgaggaggagatgcagctgaagaacccgcgcatcctcctcaagaagatcaagacggacaccctgttcaacatcgacgggttccggatgcacctgtccggccggacgggcaagcagctcctcttcaagggggccaaccagctgctcgtcaacagcgagcaggagaaggtcctcaagaaggtggtgaagatcacggagcagatcaagcagaacaagtcctacaagatcaacacgtacgacggcgtgaccgacgagaacctcaacgacctgtaccagctcttcatgaagaagatcgagaacccgccgtacaacgtgcggctctcgagccagaacccggtcctggcgaagggcaaggacaagttcgagcacgccacgcaggagaacaagtgccagatcctgtacgagatcctgcacttgttccagtgcaactcgggcgccgccgacctcaccgggatcggcggcgccaagaaggcgggcatcctggtcctggccaaggacatcaccaagtgcgggcagatctccatcatctaccagtcccccgcggggatccgggagcgggagatcgacctcaagcgcttgtga

SEQ ID NO: 166 - DNA, 4017 bp, synthetic construct
  source 1..4017: mol_type = other DNA
atgcgggactacttcgtggggctggacatggggaccggctccacggggtgggccgtgacgaacgaggagtacgagatcctgcgggcgcacggcaaggccctgtggggcgtccgcctgttcgagtccgcgaacaccgccgaggagcggcgggtgttccggaccgcgcggcggcgcctcgcgcggcggaactggcggatcgagatcctccaggagatcttcgcggaggagatccacaaggccgacgacggcttctacctccgcatgaaggagtcccgctacgtccccgaggacaagcgggactccctcgggaagtgcccgagcctcccgtacgcgctgttcgtggacagcgactacacggacaaggactaccacgggcagttcccgacgatctaccacctccggaagtacctgatggagacccgggagaccccggacatccggctggtctacctggccctccatcacatgatgaagcaccgggggcacttcctgttctcgggcaacatcgagtcgatcaagaagttcgagtcgacgttcggccagttcctggaccgcctggaggaggaggagctcgagttccacctcatcgccgaggcccgggagaacttcgggggcatcgaggccatcctgaaggactccgcgctcacccggagcgcgaagaagacccgcctcgtgaagctcctcggggcggggacctcctgcgagaaggcggtcctgtccctgatcgtgggcgggaccgccaagctcagcgacatcttcggcgacgacgagctgaaccagtgcgagcggccgaagatctgcttcgcggactccgcgtacgaggactacgcggactccgtggccggggagctcggcgagcggttcctcgtgatcgagcaggccaagacgatctacgactgggccgtgctcgccgacatcctcggcgagtacgactcgctgagcgaggcgaaggtcgccgtctacgagaagcacaagaaggacctggactgcctcaagaccttcgtgcgggagaacctcggccccgacgtgtaccggcgggtcttcgtcatctccgacgagaagctggacaactacggcgcctacatcgggatgacgaagaacaacgggaagaagtgcgacctcgcgggcaagaagtgcgaccgcgacgccttctacgcgttcctccgcaaggaggtgctcaacaacgcccccgacggggagaccgccgagtacatcaagcaggagctcgacaaggggaccttcctcccgaagcaggtgaccaaggagaacggggtcctcccgtaccaggtgcacctgttcgagctgaagcagatcatcaacaacctgaaggaccgcatcctgctcctgcgggagaacgaggagaagatcctcaagaccttcacgttccgcatcccgtactacgtcgggcccctcaacggggtccggcggggcggggacaccaccaactgggtcaagcggcggaccgacgacaagatctacccgtggaacttcagcgaggtggtgaacgaggaggagtccgccgagcggttcatccgccggatgacgaacaagtgcacctacctcatccacgaggacgtgctcccgcggtacagcatgctgtactccaagtacaccgtgctgaacgagctgaacaacctgcggctcaacggggagccgatcgacgtgcggctcaagcagaacatctacaacgacgtgttcatgcggtaccgcaaggtcacgcagaagaagctgcgcgactacctggtgcgggagggcatcgccgacaagaacgtcgacatcaccggcatcgacggggacttcaaggggaccctcaccgcgtaccacgacttcaaggagaagttgacgggggtcgacctctcccaggaggagaaggagaacatcatcctgaacatcaccctgttcggggatgacaagaagctccttctccgccggctgaaggcgatgtaccccaagctctccgacggccagcagaaggccctctgcgggctgtcctacaacgggtggggccgcctgtcggaggccttcctggagcgggtcaccgcgcccgcgccccagaccggggaggtctggaacatcatgcgggcgctctgggagaccaacgacaacctgatgcaggtgctgtcggagaagtaccggttcgccgaggcgatcgaggaggagaacggggccgacgagctccaggagatctcctaccagaccctggagcagctcggcctctcgcccgccgtgcgccggcagatctggcagacgctcaagatcgtccgcgagatctgcaaggtgcagggcgggccgccgaagcgcatcttcgtggagatggcccgggagaagtccgagtccaagcggacggagtcccggaagtcccgcctcatggacctctacaagtcctgcaaggaggaggagcgcgagtggctcgaggagctgagccacatcgacgagcactccctccgcagcgacaagctgtacctgtactacacccagaagggccggtgcatgtacagcggcgagcccatcgccctgtccgagctgtgggacaaccggaagtacgacatcgaccacatctacccgcagtccaaggtcatggacgacagcctggacaaccgggtgctcgtcaagaagacctacaacgcgaacaagacggaccggtaccccatcgacgcggacatccgcaacaagatgaagccggtctggaagtcgctgctggacgggaagttcatctcgaaggagaagtacaaccggctcacccgggggaccgggttcgagccgagcgagctcgccgggttcatcgagcggcagctcgtcgagacccggcaggggaccaaggcggccgccagcatcctgaagcaggccttcccggacaccgaggtggtgtacgtgaaggccaaggtggtctcgcagttccggcaggagttcggcctgatcaaggtccgcgagatgaacgactaccaccacgcgaaggacgcctacctgaacatcgtggtgggcaacgtgtactacaccaagttcacgaagaacgcggcgtggtacgtccggcagaaccccggccggagctacaacctgaagcggatgttcacgtccgaggacgtggtccgcaacggggaggtggcctggaaggccggggagtcgggcaccgtgggggtggtcaagcggacgatggggaagaaccacatcctggtgacccgccgggcctaccaggtcaagggcgggctgttcgaccagcagctcatgaagaagggcaagggccaggtcccggtcaagagcagcgacgagcggctgctctcgatcgagaagtacggcggctacaacaaggccgccgggacctacttcatgctggtcgagtcggaggacaagaaggggaacgcgatccggacgatcgagtacgttcccctctacctccacaagcagatcgaggccggggaggaccaggccctccgctacctgaccaaggagcgggccctgaagaacccgcagatcctgatcccgcggatcaagatcgacaccctcttcaaggtggacgggttctacatgtggctctccggccggacgggcaagcagctcctgttcaagggggcgaaccagctcgtcctctccgcccgggacgccaagacgctcaagaagatcgtcaagtacgtccagcggcggaaggagaaccccaagctgaccatcggcaaccaggacgagatccacacggaggacctcctgtgcctctacgacgccttcctggacaagatcaagtacacggtctaccactcccgcctctccgcccaggagaagaccctgacggagaagcgggaggtgttcctggagctgaacaaggaggagcagtgcctggtgctcttcgagatcctgcacatgttccagtgccagtccgggagcgccaacctcaagctgatcggcggcccggggaacgccgggatcctcctgctgaactcgaacatcaccaagtgcaaccagatcagcatcatcaaccagagcccgacggggatctacgagaccgagatcgacctgaagaagctctga

SEQ ID NO: 167 - DNA, 4035 bp, synthetic construct
  source 1..4035: mol_type = other DNA
atgagccggaagtacagcatcgggctcgacatcggggtcgcctcggtggggtgggcctgcatgacctcggacttccggatcccgaagtacaacgagcggtacgccatcggggtccgggagttcgaggcggccgacaccgccgaggagcggcggatccagcgggggacccgccggcggtacaaccggcggatcaagcggatccagctgctgcagcagagcctcgaggccctgctgcagcagcacccgaacttcctcatgaagacggaggcgaccgagaagcacttctggcggaacaacaaccagttcgagaaccggtcgctctccgaggtcctggcggacctcggggagaacacgcggaagtacccgacgatcttccacctccgccaggccctgctgtcggagaacaagcccttcgacagccggctcatctacatcgtgctgcacaacctggtgaagtaccggggccacttcctgaacgagaacatggagtggaacaacagcagcaacaacgagacgaccatcgacctgacgaaggagtacttctccatcctcacgaacctcgggtacgagacggacgacctgctcgactcgaaccacgagacgacgctgcacgacatcatccagatcctgaagtcgaacgactacaccaacaacgacaagcggaactcgatcaagaagctgatcgggaaggagttccacgacccgatcacgctgatcgtgggcctcaagtcggacatgcacaagctgttccccaacagcgagggggcggcgatctaccagtcggagaagctcaagatgagcttcgccgacgaggacatcaccgaggtgtacgagaagctcacggacgaggagaagctcgtcatcgaccaggccaacaaggtctaccagcacatcctgctgaacgacctcctggacggccacaactccgtggccgcggccaaggtgacgagctacaaccagttctccgaggacctgaagcttctcaaggacgtgttcaacaagtacctgggcgagaaggcctaccgggacatgttcatcacgacccggaagaagtggacgcagtaccagcagacgcggaagaacaacctgctctgcacgttcgaccagttcctgaagatccacgccacggaggacaagttctaccgggacctgaagaagaccatcgagaacatcatcaagaaggagcagaacgccgagctccaggcggtgctcgacaagctcaacaacaaccagttcctgcagaagcagaagagctacctgaacgccgccatcccgcaccagaacaacgtctacgaggcggagacgatcctcaagaaccagcagcagttccacccggagatcacggacaacgtgatcgagaaggtccgggagatcatctccttccggatcccgtactacatcgggccgctggtcaagaaggccacggacgacgacttcgggtgggccatccggaaggacgagcagcagcacgtcctcccgtggaccatcgacgaggtcatcgaccggagcaactccgcggagcagttcatcaaccggatgaccagctactgcgcctacctgaccaacgagaaggtgctgcccaagcactccctgacgtacgagctcttcgaggtgctgaacgagctcaacggcatccagatccggcgggagaacgacctgccggacaaggacttccggctctcggaggaggagaagctctggatcatcaacaacgtgttcaagaagtacaagaacgtgacccacacgatcctcctccgggagctccggaactccgaccacaaggagctggtgctggacacggacaccgacaacctgaagcaggtgtacgggacccagaaggagaacaagttcgggtccagcctcagctcctacatcaccctgtcggagatcttcaacaacatcgaggaggtcgacaacgacatgctcgaggagctgatctactggatcacggtcttcgaggacaaggagatcatcaagctgaagatcaaggagaagtacaaggacatcaacgacaagcagatcaaccggctcatcaacctgcccttcgcggggtggggccggctcagcaacaagctcatcaacgagctgccggccgacaagaactccggggagaccatcctggacatcatgaccaaggacgccctggtcttcatggagatcttgtcgatcgagaagtacaacctcaacgagcggatcaccacgctcaacctcaagaacaacgagtcctacacgaagatcaagtacaaggacatcgcggagctccagggctcccccgccctgaagaagggcatctggcaggccatcctcatcatcgaggagctcgtcgagatcttcggcgagccggagcacatcatgatcgagttcgcccgggaggacgggccgaacatccggacgaagtcccgccagaagcacctggcggacctccagaaggcgatcagcaaggacgagaaggagctgaaggccttcctgaaggagcactcgcactacgaggagcagaagtacaagaacgaccggctcttcctgtacatcacgcaggagggcaagtgcctgtacacgggcgagcccctggtgatctcccggctccaggactacgaggtggaccacatcctcccgcggtccttcgtcaaggacgactccatcgacaacctggcgctggtgacctacaccgcgaaccaggacaagggggacaccaagatgccgctggagacgatgaacgaggaggagaagttccagcagaagcagcactggaagaagctcttcgacaacaagctcatcagccagtcgaagtacttcaagctcatgaaggagtccttctccgaccaggacaaggagtccttcttcgcgcggcagctggtggagacccgccagatcacgaagcacgtgaaggacctgctgaacgaccggttcgagcacaccgagatccacccggtgaacgcgaacatcgtgacgaacctccgcaagcacgcggacgtcgtcaagatccgggacctgaacaacaagcaccacgcgatcgacgccgcgctcgcggtgctggtcgtgcagttcatcgtcaagcagtacgggcacaacttcctgaacttcaacttcaagttccaggaggcccggaagaagtggcgggacatgctgaccaagtacaacaagaacttcttcctcttcagcgacatcgacaagtacgacaagttcacccactactccacgggggagatcctctccggccgggagttcatgagcaccctgaactccgagatcccgtggcagaccacgaagaagatcgggagctcggagtcggcgttctacaagcagacgctgcactccccgcaggtgaagaccgcgaagtactcgtcggacaagacggtgcacggggtgtacgacgagatgaagaacgacagcacgtacctcatctcgtacaaggagctcaacaagaaggggaaggagatcatcaagaacgacttcgtcgacttgtacgtgatcgagaagtatcagctcaaggagaagggccagaaggacctggcccttttcctggccagcaagacggccaagggggaggtcgtggacgccacgatccacaccaagatcgagaagttccagatggtgtcctacgaggggcacgagttctactacatctcgagcggggagatgcacaacgccaagcagctcctgctcccgaacaaggtgatcgacaccatcaacaaggtgcggtcgaaccccaacgagaacaacgaccccacgatgctggcgaacaccttcaagaacatcgccaacgaggtgatcaagcagtactcggagttcctgccggactcccggatcgacctcctcaagaactaccactcggagatcgtcgacgcggagtccttcaaccacggcatcacggagctcttcaagacgaccagcgccagcgcggcgcggtcgcagctgttcggcgcccggtacgtcaagaagccgaagcccgagcagctgctgttcaaccacagctccatcacggggctgcggtaccggaagccgaagtcctacaagcaggacctctggagccagtga

SEQ ID NO: 168 - DNA, 4050 bp, synthetic construct
  source 1..4050: mol_type = other DNA
atgaagaacaagatgaaggtctccagcgggggccaggagtactacctgggcctcgacatggggacctcgtcggtcggctgggccgtcaccgacatgaactaccggctgatcaagaagcacggcaagatgctgtggggcatccgcctgttcgagagcgcgaacacggcggaggcccggcgggtcttccgcggggcccgccggcgcatccagcgccagaagaagcggatcgagctgctgcaggagatcttcagcggcgagatcacgaaggaggacccggggttctacctccggatgaaggagtccaagtactacccggaggacaagcgggaccagtccggcgcgaccccggtcctcccgtacgcgctcttcgtggactcccacttcaccgacaaggagtaccacgagcggtaccccacgatctaccacctgcggtacgagctgatgtacgggcagggccggaagttcgacgtccggctggtctacttggccctccaccacatcatcaagcaccgcgggcacttcctgttcgagggcaaggagatgtccgtgatccaggacttcgtgcccgcgttcgacctgttcctcagctacgcgctggagaacgggatcgagatctccgtgggggagaaccagaagcaggagatccagaagatcatggccgaccggaagctcggccggacggccaagaagcaggcgatgggcaaggtcttcgggaccgaccggcagaagaaggccctcgccgccctgctggccgggtcctccgtgaagctcgccgacatcttcggcgacccctcgctcgacgagggggagcagaagaagatctccttcgcggacagctcgttcgacgaccacatcaacgaggtggaggacatcctccaggagcggttcccgctcatcgccacggccaaggccgtgtacgactgggcggtgctgaccgacatcctgaaggactcgtgctgcatctcggaggccaagaagaagatctacgacaagcaccgggaggacctgcggcggctcaaggagctgctgcggaaccagtcggtgctcttccagcaggtcttcggcgtcccgaagaagaaggaggccaactactccgcctacatcgggatggtgaagaagaacgggaagaagatcgagatcgagaagaagtgctccaagcaggagttctacgacttcctcaagaaggtcctcaagcccctcgaggggacggaggacatcttgcaggagatcgagatgggcatcttcatgcccaagcaggtggtccgggagaacggggtgatcccgtaccagctgcaccagtacgagctgaaccagatcctggagcgggccaaggagtacctgccgttcctgtccgagacggacgcggaggggtactccaacatcgacaagatcaagaagctgttccagttcaagatcccctactacgtggggcccgtgaacaccttccacgaggaccagggcggcaactgctgggccgtccggcaggaggccgggcagatctacccctggaacttcgagaagaaggtggatctggagaagtcggccgagaagttcatccaccggatgacgaacaagtgcacctacctggtgggcaaggacgtcctgcccaaggagtccctgctctacgccaagtaccgggtgctcaacgagctgaacaacctgcggatcgacggggagatcgtctccgtcgagctcaagcagcacatctactgcgagctcttcgagaagaagcgccgggtgaccggcaagatgctcaaggagttcctggtccgcgagggggtcatccacaaggagcagatcctctcggggatcgaccagaacttcaagagctcgctcggggcctaccacgacctgaagcagatcctggagggcacccgggtgagcgacctcgacaaggaggacatcatcaaggacatcacgctcttcgcggagagccagaacatgctgaagaagcggctcaagaccaagttcccggagctgaccgagaagcagatccggtgcctggccgagaagaagtactccggctgggcccggctcagccgggagttcctggaggagatggaggcggtcaaccccaagacggggaaggactgcaacatcatcacggccctctgggagaccaacgacaacctgatgaagctcctcgggcacaagtacttctacgccgaggcggtggagaagatcaacgaggagcagatggaccactccgccatctcctaccaggacgtggacgacctctacgtgagcccgtcggtgaagcggcccatctggcaggcggtgcagatcgtgaacgagatcacccggatcatgcacggcgcgccgaagcgcatcttcatcgaggtcgcccgcgagaaggagaagaagccctcggtgaagaacagccggcgcaagcagctgctggacctctaccagagctgcaagaaggaggagtccgggctctacgccgagctctcccaggagaaggacaactccctcaagagcgacaagctcttcctgtactacgcccagctcgggcggtgcatgtactccggggaggcgatcgagctcgagcacctctacaccaaccggtacgacatcgaccacatctacccgcagtccaaggtgatggacgacagcctggacaaccgggtgctcgtcaagcgcgagctcaacgccgagaagtcggactccttccccgtgccggagcagttcctgcagaaggcgggggcgctctggcgggccctgctccagaagggcctgctctccaaggagaagtacgagcgcctgacccggcgcgaggagttctccgacggggagctggcgggcttcatcgcccgccagatcgtggagacgcggcagggcaccaaggccgccgcgcagctcctcaagatcgcgtacccgcagacggagatcgtctacgccaaggcgtcggcggtctcccagttccggcagaagttcgacctgatcaaggtgcgggagctgaacgactaccaccacgcgaaggacgcgtacctgaacatcgtggtggggaacacctaccacgtgaagttcaccaaggacgccgcgtggttcatcgagaacaacccggggcggtcctacaacctgaacaagatgttcacgtcggagcgggtggtccggaacggggagaccgcctggatccccgggaacgacgggagcatctgcgccatcaaggaggcgctctcgaagaacaacatcctgttcacccggcggtccttcgagcagaagggcggcctgttcgaccagcagctggtcaagcgggggaagggccagatccccatcaagggggccggcaccgactcccgcctgatggccaccgacaagtacggggcctacaacaaggcctccggggcctacttcatgctggtcgagtcggagtcgaagaaggggaagcggatccggtcgatcgagtacgtgccggtgtacctcgccaagaagctcgacatggacaagcactcgaagctcgtctactgcgaggagaagctcgggctcaagcaggcccacatcatcatcgacaagatccgcatcgacaccctgctcgacatcgaggggttcaagatgcacgtgtcgggccgcaccggcagccgcctgctcttcaagggcgccaaccagctggtggtgtcccgccgcttccaggaggtggtgaagaaggtctgcaagtactacaacgtgcggaaccagaaccggaacgcggtgctctccgagaaggaggagctgaccgacgaggtcctgctggagctctacgaggagttccagcggaagctcagcaacaccgtctacaaggtgcggctgcactcccagatcgcgacgctggagaaggggaaggaccggttcaccggcctctccaaggaggagaagtgcctcgtcctgtacgagatcctccacctcttccagtgcaacagcatcgcggccaacctgaaggccatcggcggccccgggaagggcggccgcctggtgatgtccaaggacatcagcaagctgaaccacatctacatgatcaaccagtcgatcaccggcttctacgagcaggtgatcgacctgaagtcgatctga

SEQ ID NO: 169 - DNA, 4056 bp, synthetic construct
  source 1..4056: mol_type = other DNA
atggggcagaaggacttctacctcgggctggacatcgggacggacagcgtggggtacgccgtgacggacgagcagtacaacctgctcaagttctccggcgacgccgcctggggcgtccacctcttcgacgaggcggagctgtcccaggagcggcgggccttccgggtggcccgccgccggctcgaccggcggaagcagcgggtcatgctgctccaggagctcttcgccccggccatccgggccgtggacgccgacttctacaagcggctccaggcctcggacctcttccgggacgaggccggggaccgcttcccgatcttcaacgacgtggactacacggaccgggactactacaaggcgtaccccacgatccaccacctcatctgcgacctcatggcggacgagacggcccacgatgtccggctcgtgtacctggcctgcgcctggctggtgtccaaccgggggcacttcctgtccaacctggacaaggagaacatctcggccctgaagaacttcgacaaggtgtactccgagttcgagcacttcttcaccgacaacgggtacgcctacccgtgggccgaggccgaccggcgcacgatcggcgagatcctcaagaagaagaccacggtgacggccaagaacaaggagctgacgctcgccttcaccgggggcgggatggcccccaaggaggcgagcgaggacttcccgttcggccagcgggccatcatcaagctgctggccggcgggacggcccagctcaaggagctcttcgaccaggaggcctacgccgagttcggcgcggtctccctcaacttcgacgacgacaagttggaggagatcgcgggcaacctgggcgacgacttcgccctcatcaccgccctgcggcaggtcttcgactggtcggtgctggtcgaggccatcggggacgccgccagcatcagcgaggccaaggtggagacctaccgccagcacaaggcggacctggccatcctgaagcggatcatcaagaactaccgccccgagaagtacgacgaggtcttccgggagatcgggaaggccaactacgcggcctacgcgtaccactccaacaagaaggccgacgccaagttcaagaaggtggaccgcgaggccttctcgaagttcatcacgggcatcgtgaaggacatcacgcccaaggcggaggacgaggagatcctcgccgacatgcggaaccgcctcgacctccgcaccttcctgcccaagcagaagaacaccgacaaccgggtgatcccccaccagctctaccagtacgagctgcacgagatcctcaagaacgcggaggggtacctcccgttcttgacggagaaggacgagtccgggctgtcggtgtccgacaagatccggagcatcttcgcgttcaagatcccctacttcgtggggcccctgaacgagaagagcgaccacgcgtggatcgtccgcaaggcggggaagatctacccgtggaacttcgaggacatcgtcgacctggacgcgtccgaggaggggttcatccggcggatgacgaaccagtgcacctacctgccgggcgagcccgtcctcccgaaggacagcctcctgtaccacaagttcaccgtgctgaacgagatcaacaacctctcgatccacggtgagcggatctcggtggagctgaagcagcagatctactcggatctgttcctgaacaagaagaaggtcacccggaagcggctccgggagtacctgatcgtgaacggggtcgtcgagaaggacgacaccgacgcgatcacggggatcgacgaggagatcaagtccaacctgctgccccagatctcgttccggcggctgctggacgagggcacgctgtcggaggaggacgtcgagaagatcatcgagcgctcgacgttctccgacgacaagacgcgcctgaagaagtggctggcgcgggagtacccgcagctcaacagcaaggacgtggactacatccggtccttgcggctgcgggacttcgggcgcctgtcgcaggccttcctggagggcatcatcgcggccgaccggagcaccggggaggccttcaccatcatcagcgcgctctggaacacccagaagaacctgatggagctgctctcggaccagttcaccttcgccgagacgatcgagcgcttccgggaggactactaccgggagcacccggtgagcctctcggagcgcatggacgagatgtacttgtccaactcggtgaagcggagcgtcttccggacgctcgacatcgtgaaggatgtcaagaaggccttcggggccccgaagaagatcttcgtggaggtcacccggggcgggtcgcccgaccagaagggcaagcggaccaagtcccggagccagcagctgcgggagctgtacgacaagtgccgggacgaggacctcccgctgctgaagcagcagctggaggccatgggggacgcggcggacagcaagctgcagtccgagaagctgttcctctactacctccagctggggaagtccgcgtactccgacaagcggatcccgctggaggccctggcctccaaggcctacgacatcgaccacatctacccgcaggccttcgtgaaggacgactccatcatcaacaacaaggtcctcgtcctgagcgaggagaacggggcgaagagcaacaactaccccatccaggggtccatccggcaccacatgcagggcttctggagctacctccaggaggtgggcctgatgtccaaggagaagtacaagcgcctcacccggagcaccccgttcacggaggaggagcggtacggcttcatcaaccgccagctgacgagcacgtcgcagtcgacgaaggcggtggccacgctcctcaaggagcacctgcccgagaccgagatcgtctactgcaaggcgcggctcgtcacggacttccggcaggccttcgacctgttcaagtcgcggcagtacaacgacctgcaccacgcggtcgacgcctacctgaacatcgtgacgggcaacgtgtacaacatgcggttcaccaagaacttcaacgtgcactcgcagtactcgatcaagaccgagacggtcttcacgcggcccgtgacgtacaagtcccagaccatctgggacggcatcgacatgctggccaaggtgaagtccatcgccaacaagaacaccgcccacatcacgaagtacgcgttcatgaagaagggcgggttcttcgaccagctgcccgtccgggcggcggacgggctcatcccccggaagaagcacctgcccacgcagaagtacggcgggtacaacaagccgggggtgatgttcttcatccccgtgaagtaccagctggggaagaagagcgagctgttcatcctccccgtggagctgctctgcgggaagcggttcctggcggacccggagttcgcccaggcctacgccgtgaagcggctcgagcggatcctcaagaagccggtcgaccagatcagcttcccgctcggcatgcggccctggaaggtcaacaccgtcctggccctggacggcttcaagtactgcatcacggggtcgtccaacgggggcacccggctgatcctccagccgatgatgtccttcagctccgcgccctactgggcgttctacctgaagaagctggaggtgttcgtggagaagaacgcgaacaacccccagcacgtctacgacgaggcgtacgacaaggtcaactgcgaggacaacctcaagctgtacgacctgtactgccagaagctgacgagcacgatctacagcaagcggatcaacagcccgctggacatcctgctccaggggcgggagaagttcagcgggctggacatcaagcagcaggcccaggccctgctgaacatccaccaggtgttcggcaggatcgccgggggctgcgacttgacgctcgtcggcggcaagaaggggtcggcggcgaccagcgcctcgtcggcgatctccaacctggggaagcggtaccaggacgtgcgggtctgggacaccagcccgtcggggctctggtccaagcggagccccaacctcctggacctgctctga

SEQ ID NO: 170 - DNA, 4065 bp, synthetic construct
  source 1..4065: mol_type = other DNA
atgtactacgggggcatcgacctcgggacgtcctccgtggggtgggcggtcaccgacacggagtaccgcctcatccggaagaaggggaaggacctctggggcgtccgcctcttcgacgaggcgaagagcgcccaggagcggcggtccaaccggaccgcccgccggcggcgggcccgcgagacggcccgcatcgggctcctgaagagctggttcgccgaggagatcgagaaggtggacgccgggttctaccagcggctggaggagtccaagtaccaccgggaggacaagaagaccggctcccggttcgcggtgttcgcggaccgggagttcaccgaccgggagtactacgagaccttccccaccatcttccacctgcggaaggagctcctggagtcgaaggcccacttcgacgtgcgcctcgtgtacctcgcggtgctgaacctcttcaagcaccgcgggcacttcctgaacgagtacctcgagtgggaggagcacgacaagtccatggcggacttgttccaggagttctccgagacgctcccggaggagcccgggctccagttcccgcagatcgcggacggcgtccagatggaggagatcctggggtcgcggctcttctcccggtcggagaaggccgagaagctggccgcgtgcctcgggatctcccgcaaccgcaacaaggcggagtacgagctcgtcaagctcttctgcgggatgagcgggaagccgtccctgatcttcgggcaggaggccctgtccgacgcctggggcaagaagcaggtgagcttccgctccagcgcgtgggaggaggagcgcgaggccctcggggactgcctcccggagggctgcatggacatgatcgaggccgccaagcggatccacgacaagggcctcctggcccacatcctgaaggggcacacgtacctgtcccaggcgcgcgtcgagacgtacgagaagcacaaggaggacctgaagaagctgcggcacgtcatcaagcggtactgccgcgacgagtacgacacgtacttccggacgatgacggaccacaactactcggggtacgtcggcaccgtgaactccggcaaggagaagatccgccggaaccgcggtgccaagaaggaggcctacaaggccttctggaaggagaccaagcggatcctggaccggatgcccccggacgaccaggaggtctcctacctcaagcaggagctcgagaaggagaccctgctgcccaagcagcggaccttcgagaacggggtcatccccaaccagctccacctggcggagctgcggaagatcctctcgaacgccgagacgtacctgtccttcttgcgcaagaaggacgagtcgggcctcacggtgacggagcggatctgcaagctcttcgccttccgcatcccgtactacgtggggccgctctccatcggggagggcggccgcaactggatccagcggaaggagggcgggcgggtcctcccgtggaacatcgaggacaagatcgacatggccaagacccgggaggccttcatcctcaagatggtgcggcagtgcacctacatgaaggggaagcacgtcctcccgaagaacagcctcctctacgaggccttcatggtcctcaacgagctgaacaacgtcaagatccggggcgagaagctcgacgtcgagctgaagcagaagatctaccgggagatgttcctgaccgggaagaaggtcaccgggaagaagctcctccagtacctgtcggccaacggcatcctctcgcccgacgagcaggatgccatcaccggcatcgacgagacgttccaccagagcctcacgtcgtacggccggttctacagcatcctgggggagcagatcgagtcccgggagatccagaacatggccgagcaggtgatcttctggggcacggtctactccggggacaagaagatggccggcgagctcatccgggagacctacggggagcggtcggggaagccctacctgaccgaggcccagatccggcggatctgcggcttcaagtggaaggactgggggcggctctccaaggacttcctggagctccaggggtgctccaagaaggacggggtcaagaagagcctgatccgcgccctgtgggagacggactgcaacctgatggagctcctcggggacgagttcaccttccaggacacgctcgccggccagatccagaagcaggagaagctcctgaaggagttctgctacgacgacctggaggactcctacctgtccgccccggtccgccggatggtctggcagaccatcctgatctggaaggagctctgccaggtcatgggcgaggcccccgcgcggctcttcgtggagatgccgcgcggggagggcgagaaggggaagcggaccgtctcccggaagaagaagctcgaggagctgtacaagacctgcaagaccgacagccgggactggctgaaggagttgcaggacttgtcggaggacgacctccggtcccggaagctgtacctgtactacacccagcgggggaagtgcatgtacaccgggcaccccatctcgctcgaggacctcctcagcgggaaccggtacgacatcgaccacatctacccccggcacttcctcaaggacgactccctcgagaacaacctggtgctggtggagaaggagtcgaacgggcacaagtccgacaccttccccatcgaggccagcgtccggagcaagcgccaggggctgtggaagtccctgaaggacgggggcttcatctcgcccgagaagtacaagcggctcacccgctcgtgggagttcaccgacgaggagctcgccggcttcatcagccggcagatcgtggagaccgggcaggccgcccggtacatcacggggctcctcgaccggctgctccccgagacgaagatcatcttcgtcaaggcggggaacgtctccgccttccggcaccagacggagctgttcaagagccgcgtggtgaacgacttccaccacgcggcggacgcctacctgaacatcgtggtgggcaacgtgtacgacacgaagttcacccagaaccccatccacttcatcaaggcgtaccgccgcgaccagaagtcgaacgcgtaccacatggacaagctgttctggtacgacgtggtgcggaacggggaggtcgcctggaaggccgggcagaccgggacgatccgcaccgtccgggccatgatggcccggaacacgccgctcctgagcaagcgggtgtacgaggcgcacggcgggatcgccaagcagaccatctactccaagaaggaggcgaaggagcgggtgtacatcccggtgaagtcctcggacaagcggctccaggacgtcaccaagtacggcgggttccgcagcgtctcgggcgcctactacttcctcgtggagcacgagaagaaggggaagcgggtgcgcacgctggagcagatgcccgtctacctcaaggcgcggctcgagaccgacgagaaggcctgggagaactactgcatggagaccctgggcctcgtccggccggagatccggtggaagaagatccggatgcggagcctcgtcaagcggaacgggtatctgatgaacctggccggccggaccgagaaccagatctacgtggagaacgccgtctccctgtgcctctcgcggcgctggatcaactacatccggggcctcgagaacttcaaggagctgggcaaggaggaggaccggcgggagaaccgcgagaagcggatcaccaaggagaagaacgagctcctgtaccaggagctcatcgtgaagcaccgcgacacgatctaccagaagaagccgaacccgatgtgcaagaagctcatcgagaagcaggaggccttcgcgggcctcctgcttcgggagcaggtccgggtgctcctggagctgctcaaggtgacccagtgccagaacctgaacatggacgccaaggagatcggcgtcaaggcctcgcccgacaagatcgggaacgaggtcaccgcccaggaggagttcctcctgatcgagcagtcggtcaccggcatctactcctgctccatcgacctcaagacggtctga

SEQ ID NO: 171 - DNA, 4068 bp, synthetic construct
  source 1..4068: mol_type = other DNA
atgtactacgggggcatcgacctcgggacgtcgtccgtggggtgggccctcacggacacgaactaccggctcatccggaagaagggcaaggacctgtggggcgtccggctcttcgacgaggcgaagtccgcgcaggagcggcggtccaaccggaccgcccggcgccggcgggcgcgggagaccgcgcgcatcgggctcctgaagtcctacttcgccgacgagatcgacaaggtggacacgggcttctaccagcggctggaggagtccaagtaccacaaggaggacaagaagaccgggaaccggttcgcggtcttcgcggaccgggagttcacggaccgcgagtactacgagacgttccccacggtcttccacctccggaaggagctcctcgagtcggacgccccgttcgacgtccggctggtctacctcgcggtgctgaacctcttcaagcaccgcgggcacttcctgaacgagtacctcgagtgggaggagcacgacaagaacatggccgacctcttccgggagttctacgagaccctcccggaggagtcggagctgcacttcccgcagaccgcggactggacgctcaccgaggagatcctcgggagccgcctgttcacgcggtccgagaaggccgagaagctcgcggcctgcctcgggatcgtccggaaccagaacaaggccgagtacgagatgatcaagctcttctgcgggatgagcggcaagccggccctgatcttcgggcaggagatcgcggccgacgcctacgggaagaagcagctctccttccgctcgagctcgtgcgaggaggagatggaggccctcggggactgcctccccgagggctacatggacatgatcgaggcggccaagcggatccacgacaagggcctgctggcccacatcctcaagggccacacctacctgtcgcaggcccgggtcgagacgtacgagaagcacaaggaggacctcaagaagctccggcacgtcatgaagaagtactgcaaggacgagtacgacgcgtacttccggacgatgacggaccacaactactccgggtacgtggggtccgtcaactccggcaaggagaagatccggcggaaccgcggggccaagaaggaggcctacaaggccttctggaaggagaccaagcggctcctgaacatgatgccccaggaggaccaggaggtcttctacctcaagcaggagctcgagaaggagaccctgctgcccaagcagcggaccttcgagaacggggtgatccccaaccaggtccacctggcggagctcaagaagatcctgagcaacgccgagaagtacctcccgttcctgcgggagaaggacgagaacgggctgaccgtgaccgagcggatctgcaagctgttcgcgttccggatcccgtactacgtcggcccgctctccgtcaagggcggggcgggccggaactggatccagcggaaggagacggggcgggtcctcccgtggaacatggaggagaagatcgacatggccaagacgcgggaggccttcatcctgaagatggtgcggcagtgcacgtacatgaagggcaagtacgtgctgccgaagaactccctccgctacgaggccttcatggtcctcaacgagctgaacaacgtgaagatccgcggggagaagctcgacgtgggcctgaagcagaagatctaccgcgagctcttcctcaccgggaagaaggtcacggggaagaagctcttccagtacctgtgcgtcaacgggatcctgtccccggacgagcaggaggccgtcacggggatagacgagacgttccaccagtccctcacgtcctacggccggttccggtcgatcctcggggacgagatcgagaaccgggagatgcagaagatggccgagcagatcatcttctgggggaccgtgtacagcaacgacaagaagatgtcgggcgagctcatgcgggaggcgtacggggagctgtccgagaagcagtacctcacggagagccagatccggcggatctccggcttcaagtggaaggactgggggcggctctccaaggacttcctggagctccaggggtgctcccggaaggacggcgtgaagcggtccctcatccgggccctctgggagaccgactgcaacctcatggagctcctgggggccgagttcaccttccgggacaccctcacggggcagatccaggagcaggagaagctcctgggggagttctgctaccacgacctggaggactcctacctgtccgccccggtgcgccggatggtctggcagaccatcctcatctggaaggagctctgccagctcatgggcgaggccccggcgcgcctcttcgtggagatgccccggggcgagggggagaagggcaagcgcaccgtctcccggaagaagcggctcgaggagctgtaccaggcctgcaaggccgacagccggaactggctgaaggagatccaggacctgtcggaggacgacctccggtcccggaagctgtacctgtactacacccagcggggccggtgcatgtacaccggccaccccatctccctcgaggacctgctgctgggcaaccggtacgacatcgaccacatctacccgcggcacttcctgaaggacgactcgctggagaacaacctggtcctcgtggagaaggagtccaacggccacaagtcggacaccttccccatcgaggccagcgtccggcgggaccggcaggggctgtggaagtccctgaaggacgggggcttcatctcccaggagaagtacaagcggctcacccgctcgtgggacttcaccgacgaggagctggccggcttcatcagccggcagatcgtcgagaccgggcaggccacgaagtacatcacgggcctgctcgaccggctcctgccggagacggagatcgtcttcgtcaaggccgggaacgtctcggccttccggcaccagacggagctgctgaagtcccggctggtgaacgacttccaccacgcccacgacgcgtacctcaacatcgtcgtgggcaacgtgtactacacgaagttcacgcagaaccccgcgaacttcatccgggcgtaccgccgggaccagaagggcaacgcctaccacatggacaagctcttctggtacgacgtggtgcgcaacggggccgtggcctggaaggccggccaggccgggacgatcggcacggtccgggccatgatggcccggaacacgccgctcctcacgaagcgggtgtacgaggcccacggcgggatcgccgagcagaccatctactcggcgggggaggccaaggagcgggggtacatccccgtcaagagcggggacgagcggctccgggacgtgacgaagtacgggggcttctcgtccgtgagcggcgcgtactacttcctcgtggagcacgagaagaaggggaagcgcgtccgcacgctggagcagatgcccatctacctcaagacgtccctggagaaggacgaggaggcgtggaagaactactgcatcgagaccctcggcctcgtccggccggagatccggtggaagaagatccggatgcggtcgctcgtgaagcggaacgggtacctcatgaacctggccggccgcacgggccggcagatctacgccgagaacgccgtctccctctgcctctcccagaagtgggtcaactacatcaagggcctcgagaacttcaaggagtccgggaaggaggaggaccgccgcgagaacaaggagaagcggatcaccaaggagaagaacgagctgctgtaccaggagctcgtgatcaagcaccgggacacgatctaccggcgcaagccgaacccgatctggaccaagctgatcgagaagcaggcggtgttcgccgagctctcggtccgggagcaggtgaacgtgctcctggagctgctcaaggtgacgcagtgccagaacctctccatggacgccaaggagatcggggtgaaggcctcccccgacaagatcgggaacgaggtcaccgcccaggaggagttcctcctgatcgaccagagcgtcaccggcatctactcctgcacgatcgacctcaagaccatctga

SEQ ID NO: 172 - DNA, 4071 bp, synthetic construct
  source 1..4071: mol_type = other DNA
atgaagcagaagtactacctcgggctggacatggggacgtccagcctggggtgggccgtgaccaacgagaagtactcgctgctccggaagaaggggaaggacctctggggcgtgcggctcttcgaggaggcgaagacggccgccgaccggcggtcctaccggaccgcccggcggcggctgcagcgggagaaggcccgcatcgggtacctccgggagctcttctcggaggagatcaacaagatcgacgcgggcttcttccagcggctggaggactccaagtaccacaaggaggacaagcgggagcaccagcccttcgccctcttcgccgacaagggctacacggaccgcgagtacttcgaggactaccccacgatcttccacctgcggaaggcgctgctggacatcgagaacgaggggaagaccttcgatgtccggctggtctacctggccatcctgaacatgttcaagcaccgggggcacttcctcaacgccaacctggacgacaagtccgggggcgacctcaaggagaagatccacatcctgacgtccatggcgaacaagctgttcgacgacatcagcttcaagaccgtggacatcaaggacatcgagcagatcctggccagcaaggactactcgaactcgacgcggctcgagaagctgctcgagctgttcgagctgtcgaagaccaagaacaaggtcgagacggagatcttcaagatgatctgcggcctgaaggggaccatctcgaagatcttcgcgaacgagagcatggacgaggaggcccagaagctctcgttctcgttccgggacgggaactacgacgagaagatcgtcgagatggaggaggcgctctcggaggagtcctacgagttcatcatgatcatgaagcaggtccacgactgggccgtgctcagcaacatcatgatgggcgaggagtacctctcggtggcgcgggtcaaggcctacgagaagcacaagaaggacctgaacatgctcaaggccctgctcaagaactactccatcaaggagtacaactccatgttccggatcatgaaggacaacaactactcgtcctacatcgggagcgtgatctcccaggagacgatccggcgcaaggggaagtacacgacggacgacttctacaagaacgtgaagtcgatcgtcctcaagtgcgaggagtgcaccgagaaggagtacatcctcagcgagatcgagaagaagacgttcctgcccaagcagaacacgacgtcgaactcggtcatcccgaaccaggtccacaagaaggagctgaagcggatcctcgagaacgcggccaagtacctcgagttcctgaacgacaaggacgacacggggctcaccgtgtcggagaagatcgtgcggctcttcgagttccagatcccgtactacgtggggccgctgagcaacggcgtctgcgacgggaagaacgtctggtccgtccggcgcgagaagggcgccgtgctgccgtggaacttcgaggagaagatcgacgtgaagcagagcagcgagaacttcatcaccaagctggtgaaccactgcacctacctcaacggggagaccgtcctccccaagaactcgctgctctacgagaagttcatggtcctgaacgagctgaacaacctgaagatcaacggggtgaagatcggggtggagctcaagcagagcatctacaacgacgtcttcaagaaggggaagaaggtcacggccaaggccctgatccagtacctgaagaacatcggggagatcgacgccaccgaggagacggtggtgtcggggatcgacggggacttcacgaaccggctcgcgaactacaagaagttcatcgagatcttcaaggtccccacgctcacctacgagcaggagcagatcgccgaggacatcatcttctactccaccgtgtacggggagtcgaagaagttcctcgaggagcggatcagggagaagtacaacgaggagctgtcggagaaccagatcaagcggatcctcggcctcaagttcaaggactggggccggctctcgaaggagctgctgctgctgcaggggatcgacaagcagaccggcgagatctccagcatcatcagcaagatgtggtcggacaactacaacctgatggagctgatcgccaccgacaagttctcgtacgggtacaacatcgagcagaagacctcgaagatcgagaaggtcctgtccgacatcgagtacagcgacctcgacgagatctacatctcggccccggtcaagcggatggtctggcagaccatcctcgtgctgaaggagctcgagaaggtcatgggctgcgagcccgagaagatcttcgtcgagatggcgcgggacgccaacgcgccgaagaagcggacggagtcccgcaagaagaagttcctcgagctctacaagacctgcaagaaggagtcccgggactggaaggaggagctcgaggacaccgaggagagcaagttccggtccaagaagctgtacctgtactacacccagaaggggcggtgcatgtacagcggggaggagatcgagctgaaggatctcttcaacgacaacctgtacgacatcgaccacatctacccgcggcacttcgtgaaggacgacagcatcgagaacaacctcgtgctggtccggaaggtggacaacgcccacaagtcggacgccgtgctggagtcgtcgatccgcaacaagatgtgcggcttctggaagatcctccgggaggggagcttcatcaccgacgagaagtacaagcgcctcatgcggaccgacgacttcagcgacgaggagcgggccggcttcatcagccggcagatcgtggagacgcggcaggggaccaaggtcatcgccgacctcttcacgaagacgttccccgagagcgagatcatctacgtgaaggcggggaacgtctcggacttccggaagaagttcgacttcctgaagtgccgcatcgtgaacgacttccaccacgcgcaggacgcgtacctgaacatcgtggtggggaacgtgtacaacacgaagttcacgcagaacccgatgaacttcatccgggagtacaacaaggaccccaaggccaacaagtaccacatggacaagctcttcgagtacccggtgtcccggaacggccgggacgcctgggtgacgaagaacgcggagtccatctgcatggtcaagaagatgatggagaagaacacgccgctcatcacgcggatgaactacgagagccacggcgggatcgccgaccagacgatctactccgccgaggacgcccagaaggccaagggcaaggggtacatcagcatcaagtcctccgacggcaacctcctcgacacctgcaagtacggcgggatgaagaagtacaccggcacgtacttcctcctgctggagcacaccaagaaggagaagcggatccggaccatcgaggccatgccgctctacctgaaggacaagctcaacacgcgggagaagatcgagaagtacttcgagcagtccgtggacttcgcctacgagcagccgaaggtgatcctggacaagatcaagatgtactccctgatcaaggtggacgggttctacctctacctgacggggcggacggggaaccagctctccgtctgcaacgcggtgcagatgagcctgtccgccgggatggtgaagtacgtccggaagatctcgatcgccaacgagcggtacgccgccgacaaggagttcgagaaggacgagaacatctccgtccagaagaacctcgagctctacgagatcctgaaggagaagcacctcaaccagatctacggcaagcggccgaaccccgtcggcgagaagatcgagaaggggatcgagaagttccggagcctcagcgtccggaagcagatctacgtgctgctgcagatcctgcagctgtcccagctgagcaaccagggggccgacctcctggagatcggcggggagaagaagaccgggacgtcgaagctcaacaagaacatcacggagaagcaggagttcaagctcatcaaccagtccgtgacggggctctacgagaacgagatcgacctgctccggatctga

SEQ ID NO: 173 - DNA, 4080 bp, synthetic construct
  source 1..4080: mol_type = other DNA
atgaacctgcggaacgtcgggtcctacgacgtggggctcgacctcggcacggggtccgtggggtgggccgtcgtcgactccgacggcggcatctgccacttcaagggcaagcccacctgggggagccggatcttccccagcgccgagaccgccgcgggggcccgggtccaccggggccagcggcggcggtacgaccgccgccgccagcggctcaagtggctccaggagttcttcctggaggacatgaaccggctggacccggacttcttcacgcgcctgaaccaggcgcggctcctgccggaggaccggaaggaggggtgcgccgactaccactggccgctcttcaacgagtccgacttcaacgaggtggactactaccggtccttccccaccatctaccacctgcggaaggcgctggcggagaaggaggggaaggccgacctgcggctcatctacctggcgttccacaacatcgtgaagcaccgggggaacttcctgcaccaggacgtccccgggctgagcgcgcgggacgccagcgcgcaggcgtccacctcgtgcctccacgaggcggtggaggagtggtccagcctcctggacctgggggtgagcttcgactgctcgaacttctcccggatcctggaggaccggcggctcagccggtccgacaagaaggacgccctcatgggcaccttctcgtacgggcgggaccagaagaagttctgccaggcggtggtctcggcggtcctggggtaccaggcggacttcggctgcatcttccaggtggagggcgaggggctgaagttcaaggtctccgaggaggagaaggccgagatgttcgtctcctcgtccctcccggacgagggggcgagcctgttcgacgcgctgtgcagcgtgcacagcagctacgtcctcctcgggatcctgaaggactccggcgggaagaccctgtcgttctgcaaggtccgggactacgagaagtaccaccgggacctcagcctcctgaagtccctggtgcggacgtactccccggagtcctaccgggacttcttcgggggcagcctccggcagggggcctgcccgtcggactacgacccggagaaggcctcggggtacaccaagtacaacctccacaagacctcgtacgaggacttccagaaggagatccgcaagctcctcgaggcgaaggccaagctggacgacgactaccaccggatgatggacgagttcgccgaggggagcttcctccggcggctcaagacgtcggacaacgggagcatcccctaccagctccacctcgaggagatgcacgcgatcatcgagaaccagaaggcgtactaccccttcctgggggagaacgccgaccggatcgagtcgctggtctccttccggatcccgtactacgtggggcccttgacgcagcagaacgccgccgtggaccgccgggggaacccccggttcgcctggtcggtccgcaaggaggggatggagaaggcccccgtgcggccctggaactgggacgaggtcatcgaccgggccgagtccgcggagtggttcatcgcccggatgacgggcacctgcacgtacatccacgacgagccggtcctgccgaagtgcagcctcctgtacgagaagttctgcgtgttcaacgagctgaacggggcccggtggacccaggacggggacagcgaggtccggttcgacgcctcggaccgggaggggatcttcgaggacctcttcaagcgggggtccgtgacctacaagaaggtcgaggactggctcgtccggcggggcgccctgaacccccacgtgagcgggggccagggcgagagcaagttcgagagcaagctctcgagccacctgttcttctgcaacgtgctcgaggtcgacgacctcagcaaggcggacgccgacatggcggaggagatcatcctctggaacacgctgttcgaggaccgggccatcctcaaggagaagatcgaggcgtcgttcggctcgcggctcaacgccgaccagatccggaagatctgcaagaagcggttcaccgggtggggtcggctgagcaagaagctcctctgcgacatccgcgtggagaccaactcggggagcaagtccatcatggacgtgctctccgaggggaacccgaacatctgcggggccacgaaggccatggtcttcatggagatcctgcgggacgacaagctcgggttcgaggaggcgatccggaacgagaaccgggaccgcctcaagacgggcttcctgtccgtcgacgagctgccggggagcccggcgctccggcggacggtcaaccaggccgtccgcatcgtggaggagatcacctccatcacgaagcacgccccggacaacatcttcatcgaggtgacccgggacgaggacccgcggaagaaggggctgcgcaccaagcggcggtacgaccgcatcaaggaggcgctgaccatcttcaagggggagtcctcgggcgtgctgagcgagctgaagcggcgggaccacaaggagctcgacgacgagcgcctggccctgtacttcatgcagaacgggcgctcgttgtactcgggcaactccttggacatccgccgcctcagcgagtaccaggtggaccacatcatcccgcagagctacatcaaggacgacagcttcgacaacaaggccctggtcctcgcggacgagaaccagcggaagctggactcgctgctcctggaccagtccatccaggacaaccgcaaggacgagtggcgggcgctgttcgaggcggggctcatctcggagaagaagtaccggaacctcatgtgcgactccatctccgagggccggctgaaggggttcatcaaccggcagatcgtggagacgagccagatcgtcaagtacgtgcagatgatgttcgaggggctctaccccgagacgtcggtggtgcccgtcaaggcggcgctgagctcgcagctccgggaggagtgcgggttcgtgaagtgccgggagatcaacgactaccaccacgcgcacgacgcgctgatcgcctgccagatcgggcggttcatccagttccgccacagcgggatctacagcaacccgatcgggtacacgaaggtggtgcgcgactacgtgcgccagctcggccggcagatgaagtactcccggaagatgcccgggtcggcctcgttcatcgtgagcagcttcctcacgagcgggttcgaccccgagacgggggagctgttcaaggaccggtgggacgcggacttcgagtgcgaccggatccggaagtacctgaactacaaggactgcttcatctcgcggatgccggagatcacctccggcgagttctgggacgccacgatctacccgcccgacaagaaccccgtgctgccgctcaagaaggggctggaccccaagaagtacgggggcttcagctcccagaagttcgcgtacttcttcgtgtacgagtgcacgaagaaggacaagaaggtcttcgggttcagccccgtcccggtctgcgtggcgcagagcctgggctcgaacagccgggccctcatcgactacgccaagcagctgtgcagcgagtcggggacggagttcgtgcggatcgcccgcaagcagctggcgaagtaccagctggtggagatcaacggcgagcggttctacctcaccgggaagaaggaggtgaggaacgccacgcagatcgcgttcgaccaggcccagacggacctgctcaagcgggccttcgagggcgagatctcgaactcgatctcgctctcggacatctaccggtacacgctggacttcagcgaccggtacagcagccgggtcagcgcgctgctccggctgcgggagtgcgagcaggagttcgccaagctcccggtggagatccaggccaacctgatcaagtccatcctgcagtgcctgacggccaagtcgaaccggatcgacctgtccgccatgggcgggtcgaagagcgcgggctgcatccagcccacgttcgtgaagatcttcaactccgacaaggagtccttcttcgtcatcgaccagtcggtgacggggatgttcgagaagcgggtccgcctcgggttctga

SEQ ID NO: 174 - DNA, 4080 bp, synthetic construct
  source 1..4080: mol_type = other DNA
atgaaggagcgcgagtacttcctcgggctcgacatggggacgggctccgtggggtgggccgtcaccgacacggagtacaacctcatcaagatcaaccggaagcgggcctgggggagcgtgctcttcgagacgtcgaagggcgcgaaggagcgccgggtgaaccggtgcgcccggcgccgcctcaagcggcagaaggagcggctcgacctcctgcgggagctcttcgaggaggagatccagaaggtcgactcgggcttcttcctccggatgaaggagtcccgctacgtctacgacgacaagcgggacgagaacggggtgaagccccagctcccgtactcgctgttcgtggacgagaactacacggacgtggactaccaccgggacttcccgaccatctaccacctccggaaggccctgatggaggaggaccggaagttcgacgtccggctcctctacctggccatcgcgcacatcctgaagaaccgggggcacttcctggccaacatgggcagcgacgaggtgaacctggacctgaaggagtccttcaaggccctgctgggcaagtggaacgacatgatggcggacgacgacatcatgtcggtcacggcggggtcggagcagctcgagcagatcgagaagaccctgaaggacacgcgcatcgtcaagagcagcaagaagcaggagatcatcaacatcatcgggatcgcggacaagcggttcaaggagctcgcgtccctgatcgccgggggcaaggtgtcgctctcgaagctcttcgaccggaaggactacgagagcctggagatcaacaagatctccttcgacgacgcctcgtacgaggagaacgaggagtactacgcggccaacctcgaggacaactacgacatcatcgcgtgcgcgaagaacgtgtacgacgggatgatcctgtccaacatcctcaagggggacgagagcgggttcatctcggccgcgaaggtcaaggactacgacaagcacggcaaggacctgaacctgctcaagcgggtgatcctcgaggagggcatcggcgaggacaagcagcggaagatcctgtacaagcgggtcttcggcgtcacgaagaaccaggacaacaactactcgcgctacgtcggcgtcgtgtcgacgaagggccggaagggcgtcatcgaggacaagaagtgcacgcgggcggacttctacaacttcatcaagaaggagatcctccccgagatcaaggagggggacaacaaggagtacatcatcaacgagatcgaggccgactccttcatgccgaaggcgcgcgtgaaggagaactcggtgatcccgtaccagctccacaagaaggagctgaagaagatcctccggaacgcggagaagtaccacccgttcctcaaggagaccgacgagacggggaagtcggtctccgagaagatcatcatgctcctggagttcaagatcccctactacgtggggcccttgaacgtgtccgggagcaacgcgtgggccgtccggtcctcggggaagatcaccccgtggaacttcgaggagaaggtcaacatcgaggagtccgcgaagaacttcatcgagaagatgacctcgaagtgcacgtacctcaagaacgaggacgtccttccgatgtcctcgctgacgtacgagaagttcatggtgctgaacgagatcaacaagatcaagatcaacagcgagcccatctcggtcgagctcaagcaggacatctaccacgagctcttcgagaagaagctcaaggtgacggtcaagcggctcatcgactacctgaaggccgagaagggctacgctgacctcaagaaggaggacatctcgggcatcgacatcgagatcaagtcctccctcaagtcctaccacgccttcaaggagaagttcacgggggtgaacctctccgagaaggcgaaggaggacatcatcaaggacatgacgctcttcggcgcggagccgaagctcctgaagaagcggctcacgtccaagtaccccgagtacgagaaccagatcaacagcctgatcaagtccttgaagtgcaaggactggggccggctctcgtacaagctcctgaacgggctcgcgatcgacgtgcccgggcaggggatgatcggcaccgtgatgtaccggctctggaacaccaacgagaacttcatgcagatcatcgagagctcggactccccgtacgccaagctcatccgcgaggagaacggggaggcccggaagaagggcatcgactactcgatcgtgaacgacctgtacgtcagcccggccgtcaagcggcagatctggaaggccctccaggtcaccgacgagatcatgcacgcgatgggcaagccgcccaagcgcgtgttcgtcgagatggcgcgcgaggagggcgagaagaagcggtccgtgacgcggaaggaccggctgatcgagctgtacaagtccatcaaggacgagaaggccctctacgacaagctcctcaagaccgacaacgacgcgctccggagcgacaagctctacctgtactacacccagctggggaagtgcgcctacacgggcaagaagatcgagatcgacgagctgatgaacaacaacaagtacgacatcgatcacatctacccgcggtccaagaccgcggacgacagcctggacaaccgggtgctcgtgtacaagcccgtgaacgaggacaagaacgacatctacccgctggggaagttcgacagcgggatctacgaccggatgcgcaacgactggctcatctggaagcagaaggggctcatcagcgaggagaagtacaagcggctcacgcggacgacggagctgacgtccgaggagctgctggggttcgtgaaccggcagctcgtcgagacgcggcagtccaccaaggcgttcgcggaggcgctccggtacgtgatcccggaggagacggagatcgtgtactccaaggccgggaacgtgtcgcggttccggcagcagtacaagatcctgaaggtccgggacatcaacgacctccaccacgcgaaggacgcgtacctgaacatcgtggtggggaacgtgtaccacctccggttcacgaaggacgtccggaagtacttcaacaagaacgggacggaccggacgtacaacctgtacaagatgttcgacaaggacgtcaagtgcgggttggagaccgcgtggaaggaggggaaggacgggacggtcatcaaggtcaaggagaccttgaagtgcgaccgcgtcctggtcacccgccagacctacgaggcgggtggcaagctcttcgacgtgcagcccaagaagaagggcaagggccagatcccgctgaagagcgggaagggcaacgagcgcctgaacaacatcaacctgtacgggggctacgacagcgcgtcgatcacgtacttcatgctgatcgagggccggaagaaggaccggcagttccggtacatcgtgccggtgcccctgtacctcaagaaccggatcgaggcggacgagaagttcgccaaggagttcttcgaggacgagtacaagctcaaggatgtcaagctgatccggaagatcctgatgcagaccctcatggtcctcgagggcttcaagatgcggatcgccgcgaagacggacaaccggatcagcttccacaacgcgaaccagctccagctggagcagaagtactacaagccgatcaaggagatcatcaagttcctccaggagcggaaggagcgcaagggggtcacgatcaacgtgaactccgggatcacccacgaggagctgatcaacatgtacatcatgttcaagaagaagctcagcgactcggtctacaacgagatgctgggcaagtactgcgacgtcatcgagaacgggacggcggagttcaagaagctcacgctcgaggagaagagcgtgcagatctacgagctcctgaagttcttccgctgcacgtccgagctgagcgacctcagcatggtcggcggctccaagaacgccgggaccatccggatctcgatcaacgaggtccccaagcggaagaacctggcgatcatctaccagtcggtgaccgggatctacgagaagatcgagcggatcaacgagtga

SEQ ID NO: 175 - DNA, 4092 bp, synthetic construct
  source 1..4092: mol_type = other DNA
atgaagaacgccaagaacaagaactactacctgtccctcgacatcgggacggactcggtggggtacgccgccaccgacgagaactacaacctcctgaagttccacggcgagcccgtgtggggcgcgacggtgttcgacgcggcctcgctgaacacggaccggcggaccttccgcacggcccggcggcggctcgaccgccgccagcagcggatcgacctgctgcagcagctcttcgcgaaggagatcgggaagatcgacccgcggttcttcatccggatggaggagtccaccctctacccggaggacaaggcggacaagtacaccttgttcaacgacaagaacttcacggacaaggagtaccacgacaagtaccacacgatccaccacctgatcgacgagctgatgaagagcaacgagccgcacgacgtgcggctcgtgtacttggcgtgcgcgtggctgatcgcgcaccgggggcacttcctccagaacatctcggtggagaagctctcggacatcaaggacttcgaccggatctacgagaacttcatcgcctacttcgactcgaagggcttcgacaagccctggaacaaggactccatcgacgccacgaagctggcggagaccctgaagaaggactcggggatcacgcagaagtacaaggcgctctgcgagctgatctacaacgggaagcccccgaaggagatcagcgacgagttccccttcagcaaggaggggatcctcaagctcctggcgggcggcacctacgagctggcgaagctcttcgacaacgaggactacgccgagctcaccaacaagtcggtgagcttgtcgatggacgacgacaagctcgccgagatcgccgccgagatcggggacgactacgacctgatcgagaacctccggtcgatctacgactggagcattctcgtgaacatcctggcggcgaagaacacgatcagcgaggcgaagatcaaggtgtacgagcagcaccagaaggacctggtgttcctcaagcacgtggtcaagacgtacatccccgagaagtacgacgagatcttccggaagacggactgcgccaactacgcggcgtacagccggcacacggacgagccccacggggccaagtggggcaagaacaaggtcgacttctcggacttcctgaagaagatcatcgacaagatcacgccctcggagggcgacaaggcccagttcgaggacatgaaggagcggctgcagttccagaagttcctgcccaagcagaaggactcggacaaccgggtcatcccgaaccagctgtacctcttcgagctgaaggagatcctgaagaacgcgtcgacctacctgccgttcctcaacgagaccgacgaggacgggatctccacgaagagcaagatcgagtcgatcttctccttccggatcccgtacttcgtcgggccgctgaacgagcggtccgacaaggcctggctggtccggaaggcggaggggaagatcctcccgtggaacttcgagaagattgtggacctcgaggcgtcggagaacgagttcatcaagaagctcacgaacaagtgcagctacatcccgggggaggacgtcctccccaaggactccctcgcctaccacaagttcgaggtgttgaacgagatcaacaacctcaagatcgacggggagaagatctccgtcgagctgaagcagcggatctacaacgagatcttcatgatgaacaagaaggtcacccggaagaagatcgagcagttcctggtgaaggaggggttcatcgagaaggggcgggaggccgccctgacggggatcgacatcacgatcaagtcggacttggcgccgcagcacgccttcaagaagctgatggacagcaacacgctgaccgagaacgaggtggaggagatcatccagcggtccacctacgccgaggacaagtcccggctgagcaagtggctcgagcgggagttcccgaagatcaacgaggaggaccgcaagtacatctgcaacatcaagatcaaggacttcgggcggctgtcgcgcaagttcttgtgcgagctccaggggatcaacaaggagaccggggagccgtgcaccatcctgggggcgctgtggaacaccaactgcaacctcatggagatcctggcgaacgaccggttcacgttcaccgaggagatcgaggagctgcggaagacgtactacagcgagcacggcgacctgaagctggaggaccggctggacgagatgtacatctcgaacgccgtcaagcggccgatctaccgggcgctcgacatcgtctccgagatcaccaaggcgttcgggaagcccacgaagatcttcatcgagatggcgcggggcggctcgaaggacaagaagcgggagcggacgaagtcccgcaaggaccagatcctggagctgtacgacaagttcaagaacgaggacgtcgtgcacctccggaagcagctggaggagatgggcgtgagcgccgacaacaagctccagggggacaagctgttcctgtacttcatgcagatgggcaagtgcatgtacacgggcaagcccatcgacatcgccaacctgggctcgaagctgtacgacatcgaccacatctacccgcagtcgtacgtgaaggacgacagcatcatcaacaacaaggtgctcgtcctgagcgaggcgaacggcctcaagggggacaagtaccccatcgaggagagcgtgcgcaaccagatgcgcgcgttctggaacctcctcaaggagaaggagttcatctccgaggagaagttcaagcggctcacccggagcacgccgttcaccgaggacgagaagctcgggttcatcaaccggcagctcacggagacgagccagagcaccaaggccgtcgccacgctcctgaaggagaagttcaagaacacggagatcgtgtactgcaaggcggggctcacgtccgagttccgccaggagttcgacctcttcaagtcgcggctcttcaacgacctgcaccacgcggtcgacgcgtacctgaacatcgtcacgggcaacgtgtaccacacgaagttcaccaagaacttcaacgtgaacacgcagtactcgatcaagacgaaggcgctcttcacccacccggtgatctgcaacgggaagatcatctgggacggggacaagatgctggccaaggtcaaggagaccgccagcaagaacaacgcgcacttcaccaagttcgcgttcttcaagaagggcgggctcttcgaccagatgcccgtcccggcggccgaggggctcatcccccggaagaaggacctgccgacggagaagtacggcgggtacgacggggtgagcacctcgtacctgctgctggtgcggttctacaccagcaagaagagcgaggtgatgttctaccccgtcccgctgatgctggcggagaagttcgagaaggaggacggcttcgccgaggagtacatcctcagcacgctccggacccagaagaacaacaagatccagaagatcgagatcttgttgaagggccggaagttcaagatcaacagcgtgctgagcctcgacggcttccgggtggccatcgcggccgccagcctcaaggacggccggatggccttccacccgctgatgcagttcagccactccctgcagacggtcttctacatcaagaagctggagaagctggtggagaagaccaaggagaactcgaagctcatctacgacgccgagcacgacatggtgacggtggaggagaacctgaagctgtacgacatctacctgtcgaagctgcagaccatctacagcaagcggccggggaacgggaacatcgccctcgacctcgccaacaagaaggaggtcttctcggcgctgccgccgatcgagcaggccaaggtgctgctccagatccactcgctcttctgccggaacagcttctccggcatcgacttgtccctgatcgggctgtcgaagaagacggccatcgtgcgcaagtcgctgtccctgtcgagctggaagtcggactacaacgacgtccggatcatcgacagcagcgccagcgggctctgggagaagaagtccgagaacctgctggagctgctgaaggtgtga

SEQ ID NO: 176 - DNA, 4155 bp, synthetic construct
  source 1..4155: mol_type = other DNA
atggcgaagaaggacaacaaggtcctcttcaagttcaacgaggacaagatgaagaacgtcaaggagtactacctcgggctcgacatgggggtcgggtccgtggggtgggccgtgacggacacgaactacaacgtgatcaagaagtcccagaagagcctctggggctcccgcctcttcgaggaggcggagacggccgccggccggcggacctaccggtccagccggcggcggctgaaccggcgcaaccagcgcatcaagctcctccaggagtacttcgccccggcgatcagcaagatcgacccggggttctacatccgcctcaaggactccttcttctacgaggaggacaagaccgagcagcagaagaacacgctgttcaacgactcgtccttcaccgacaaggactaccacctggcctaccccacgatctaccacctccggaaggagctgatcgacaaccccaagtaccacgacccgaggctggtctacctggcgtgcgcccacatcctcaagaaccgggggcacttcctgtacggggcgcagaagttcaacacggaggcgctcctggaggagtccatcaaggacttcaacgagctgtactacgagtacttcgacatcaagctcttcaacgacgagaagatctacgagatcgagtccgccatcctggagaagaacctctccaggagcgggcgggccaagaccctcgagggcctgctgaacgacaaggacaagcgggccaagaagtactgcaacctgctcgtggggaacctcgccaagatcgaggacctcttcccggaggagctcgagatcgaggagtcccagagcaagcccaagttctcggaggggaactacgacgagcccgacacgcaggactacctgctcgagaacttgaacgaggagcagctcgccatcgtggacgaggcctacaagatctactcggccgcgatcctccaggacctcctgtcgaacaagagcgggcacaagttctccaccatctcggaggcccgcatcgacacctacaaccagcacaagaaggacctgaagctgctgaaggaggtcgtgaagggcatcgagaaggagaacccgtccgcgaagggcctgtacaacaagatcttcaaggagaacaccaagaagtacaagaactacgtggcctactcgggccacacgtcctcggacgacaagaaggagaagatcggcgtggaggagaagacctcctacgaggacttctccaagttcctcaagaacaacctctcgaagtacgagaagcaggacgagcgcatcgaggagatcatcgagcagctcgacctgaacaacttcctgccgaagatcacgaccaccgacaacggggtcatcccgtaccagctccacctcgacgagctggagaagatcctcgacaacgccaagaagtacatcgaggagctgaacgagaagaaggccgacgagatcaagcagatcttcaccttccgcatcccgtactacgtcgggcccttcgacacgcgctccgagttctcctggatcaagcgggagagcttcgagtccatccgcccctggaacttcaacgaggtggtggacctggacctgtcctcggagcggttcatcaaggagatgaccaacaagtgcacgtacctcatcggggaggacgtgctcgccaagaacagcatcctgtacagcgagtacatgatccggaaccagctgaacacgctgaactacgtcagccccgtgacgaaggacatcaagcggttcgaccacgagacgatcgagtacctgtacgagaagctgttcgtggagaacacgtccgtccgggtgacgaagaaggccatcgccaacacgctgaagaactacaacagcatcttcgccgacatcacgtcggacagcatcggcgggatggacctcgagatcccgcacaagctgaaggcgctgcaggacttcaaccggatctgcagcggcaagctcaacaacaaggagatcgacaagatcgtcgagaagatcaccgtcttcccggacgactccgagatggtcgcgcgcttcatccggaaggaggagttcagcgacaagctgaccgaggaggagatcaagaagctctcccgcctccggtacacggactgggcgccgctgtcggagaagttcctgacggggatcaagaccgagctgaacaacggccggaagtactcgatcatcgacatcctgcggaagaacccgctgaaccccaacagccccctcaacctgatgcagatcatcaacctgaaggagttcaacttctccgagctcatcgaggagcacaacctcggggagaccaacgacccctacgtggtcgacgaggagctcctcgacagcctccggctgtcggcgcccgtccgccggagcatcaaccagaccctcctggtgtgcgaggacatcttcaagatcatgggcggcacgccgaagaagatcttcgtcgagatgacgcggtccgagggcgagaagggcaagcggaccacgtcgcggaagaagcagatcgagaagctgtacgagtcgatcaagaccgacctgaaggactggtacagcatctggaaggacaagctgaagtcgatcgacgacagcgagtaccaggcgaagagcatctacctctacgccatgcaggccggccgggacatgtactccggccaggtcatcgacgagccccggaacctggaggcgtacgacatcgaccacatctacccgcggtcgaagaccaaggacgactcgtggaacaacctcgtcctggtctccaagaagtcgaacgccatgaagggggacaaggtcctctccgaggagatccagaacaagaacaaggactactggcagatgctcctcgacaaggggttcatgtccgaggagaagtaccgccggctcacgcggaagacggagctggacggggaggagctccgctccttcgtcaaccggcagatcgtcgagaccggccagtcgacgaaggccatcacgacgatcttcaaccggatcctgccggagtccaagctggtgttcgtcaaggccaacctggtcagcgacttccgctacaacgacgggaagaagtcgaaggtcatcagcgacctgaacttcccgaaggtccgcgacctgaactcctaccaccacgccaaggacgcctacctgaacatcgtggtgggcaacgtgtacgacacgaagttcacggaggggttcttcgagtccctccggaacaaggagcaccccaagtacaacttggagcgcatctacgacaagaacatcgccgacaagaacggcgagctggtgtggatcgccggcgagaacggcacggtggccaccgtgaagaagttcatgaaccggaacaacatcttcgtcacgtaccgcaccttcaagcggacggggaagctgtacgacgtcaacctcaacaagaaggggtcgggccagtacccgatcaagacgtcggacaagcggctcatgaacctcgacaagtacggtggctacaacgggaccaaggggtcccactactgcctggccaagatcaagaagggcaagaagatcgagtacaagctgctcaccgtgccgatgatcttcgagaaccggaagagcatcaacggggagaccctgatcgagtactacaagaaccagggcgagaacatcgccgagatcgtcaccgacgacatcaagatcaacaccatcctcgagatcgaggagaacctctaccggatccagtcggaccacgacaagagccggatcatctcgccggagtactgcgtggcccactacgggctgaaggaggagaagatcatcaaggacatcgagcggatcacgctcgggaagaccatccggaacgacatcaacgacaaggtcctcgacgacatctacgacgggatccgcctgaagctcaacagcgagaagctgaagaagtacagcttctacgaggagctgaacaacgacatgctcgacaacaagggcatcttcaacaagctgacgatcaaggagaagtgcgagtgcatcatgaagatcgtgcagatcatcagcgggatcaaccaggagaccgacctccggatgatcaacctgaagaagaccatcgggcggaaggcccggtcgcggaccatcaaggggaacaagctccggatcctccaccagagccccacggggttctactcctcgtgggaggaggtgtccctcgagtga

SEQ ID NO: 177 - DNA, 4164 bp, synthetic construct
  source 1..4164: mol_type = other DNA
atgaacctccggaactgctccggggagtacaacatcggcctggacatggggaccgggtcggtggggtgggccgtcgccgacaacgacggccagctgttccacttcaagaagcagccgacctggggcagccggctgttcgagtcggcgaacaccgccgccatggcccggatcccccggtcccagcgccggcggtacatccgccggcgctggcggctggacctcctccagtcgctgttccaggacgaggtggagaaggtcgacccggagttcttcatccggctccggcaggcgcggctgctggaggaggaccgggccgaggggcacagcgactaccgctggcccctcttcaacgacacggacttcacggagcacgagtactacaagctgttcccgaccatctaccacctccggaagtggctgatggagaccgaccagcaggcggacatccgcctgatctacctggcgatccacaacatcgtgaagcaccgggggaacttcctccgggaggaccagaagtccctgtcggcgaagacggcgaagccggacgacgcgctccacgcgttcttcaaggccctgaacgactggtgcgcgtcgcgcggctacgagaccgtgaacgacacggcctcggagatcatccgggtgttcaacgacgaggaggcggccccctccgacaagaagaagcggatcgccgcgctcctctgcatctcgctgggggacgacagcgcggcgaaccgcaagtgcaacgaggcgctggccgccgggatggtcggcctgaaggccgagttcaagaacgtcttcggcgagttccaggccgagaagacggcggtctacctgtcgaacgacgaggacgtcgaggccctccgcgagatgtgcccggatgactccgtggacctgttcaaccgggtctgcagcgtgtacagcgcctacgtgctgcaggagctgctgtcgtacgccccgggggagaccatctccatcaacatggtgaagaagtacgagcagtacggggaggacctcgcgctgctcaagaacctcatccgggagtacgcccgggagagctacgacaacttcttccgggggcccaagtacccgggcacgaacatctacgacgtgtccaaggtgcaggggtacaccaagtacaacctgggcacgtcgaagctgtcctacgacggcttcgagaaggccgtcgtggacctgctggggaagaccagcgcggtcaacgacgagcggtaccagagcatggtggacgcgttcgagaagcagcggttcctgcggcgcctgaagacctcggacaacgggtccatctactaccagctccacttcgaggagctgaaggcgatcctgaagaaccagtcgcggttctacccgttcctgatcgccgacgagaagaagatcgagtcgctcgtgtcgttccggatcccgtactacgtcggcccgctgacgtcgcggaacgccgcgatcgaccagcacgggaacaagcggttcgcctgggccgagcggaagccgaaccaggacaacacgccgatcacgccgtggaactgggactccgtgatcgaccggaacaagtccgcggagaagttcatcaagcggatgaccgggacgtgcacctacctccagggggaggaggtgctcccgaagtgctccctgctgtacgaggagttctgcgtgctgaacgagctgaacgggctccggctcaccatcgacggcgaccgggagtaccggctcgacgcggcgcagcgggaggggatcgtgcacgacctcttccactgcaagcggagcgtctcgtacaagcagatcgaggggtggatcacccgggaggaggggttcgagtacccccacgtcaccgggggccagggggcctccgggctggagtccaagatgggctcctacctcttcttctgcaaggaggtgttcgggatcgacgagctcgacccgaaggactacgcgatggtcgaggagatcatcctgtggaacaccctcttcgaggaccggaagatcctccacgagaagctcgtggagaagtacggccggcaggccgggggccccctgagcgaggagcagatcaagaagatctgcaagaagcggttcacggggtgggggcggctgtccaagaagttcctcaccggcctcaaggtccagaccgaggccgggccgaagagcatcatggacgtcctccgggagggggacccgaactccgactcccggcggggccgcgccatggtcatgatggaggtcctccgggacgagaacctgggcttccagaagatggtggacgacttcaacaagaactacttcgaggccaacgggaagctcgcggagatcaacgagcttcccggcagccccgcgatccgccgctcgctcaaccagaccatccggatcgtggacgagatcgcgaagatcgcggggcacgccccgacgaacatcttcatcgaggtgacccgggaggacgacgagcggaagaagggccggcggaccaaccgccggtacgacgagctcaagaacgccctggagcggttcaagaaggaggacccggaggtctggcacgggatctgcgacaccgcgcccaaggacctcaacgagcgcctcacgctgtacttcatgcagcgtgggaagtgcttgtacagcgggcggccgatcaacatcaaccagctgtccgacacgggcctctacgaggtggaccacatcatcccccgggcctacatcaaggacgacagcctggagaacaaggccctggtctaccgggaggagaaccagcgcaagaccgacgcgctgctgatcgacagcagcatccggcagaagatgtcggactactggcggatgctgcacaacgccaagttgatcggggacaagaagtaccggaacctcctccggtccaccatcgacgagaaggccatgaaggggttcgtggcccggcagctcgtggagaccagccagatggtcaagatcatccagagcatgctgaaggtgcggtacccgaacaccaagatcgtgcccgtgaaggcctccatctcgcacaacctgcgggaggaggccgggttcatcaagtgccgggaggcgaacgacttccaccacgcccacgacgcctacctggcgctccggatgggcctcttcatccagaagaggcacccgggggtgtacgagaaccccatcgggctgacccgggtgatccagaagtacgtccggagccagtccgaggagttcaagcgcacccaccacttccccgggtccgccgggttcatcgtgaactccttcatgagctccggcttcgacaaggagaccggggaggtgttcaaggacgactgggacgccgaggcggaggtcgaggggatccggcgggccctcaactaccggcagtgcttcatcagccggatgccgtacgaggacacgggggtcttctgggacgccacgatctactcgccgcggaaccagaagaagaagccggtcctcagcctgaagaacgggctggacccccagaagtacggcgggtactcgcgcgagcagttcgcgtacttcttcgtgtacgaggcccggaagccgggcaaggacgagcacctgttctgcttcgcgcaggtgcccgtctggctggcgatgcgcatcaaggggaaccaggacgcgctggactcctacgcccagaagctggcgcagtcggaggggttcgagtacatcgggatcgagcgggccaagatcctgaagaagcagctgatcgagatcaacggggaccggctgatcgtgaccggcatcaaggaggtgcggaacggcaaggagctggccttcacctccgacgagctggcgctgatcagccggatcacctcgcagaaggagctcaacgagagcgacaacgagctcctgaacgagatctggaaccggctggtggactgcgggaaccagatcgggtggcacttgatggcccagctcaagctgggcgggtacaacgagaagttctcgaagatcgactccaagtcgaagtcggaggtcatcctcgggctggtgaagatcatcaacgccacgacgaacgtcgtggacctcagcctgatcgggggcaagcagcacgccggctgcatgctcctgaactacagcaacgtgctgttcgactccaacacggacttctacatcgtggaccagtccgtgacggggatgttcgagcggcgcacccggatcgggttctga

SEQ ID NO: 178 - DNA, 4185 bp, synthetic construct
  source 1..4185: mol_type = other DNA
atgaacctccgcaaggcctcggactactccgtgggcctggacctggggaccgggtccgtgggctggtgcgccgtggacaacaacggccacctctacagcttcaagcggaagcccacgtgggggtcgcgggtctacgactccgcggcccccgccgcggacgcccggcagttccgggcgctgcggcggcggtacaaccgccgccggcagcggatcaacctgctgcaggggctgttctcggaggagatgaaccacgtcgacccggacttcttcatccggctcaaccagagccagctcctgaaggaggaccgggacgagacgtgcaaggactacgcctgcccgctgttcaagacggtggcggacgagaaggagtactacaagacgtaccccaccatctaccacctccgggcggccctgatgcacgccaaccagaagatggacctgcggctggtgtacctggcgctgcacaacatcgtgaagtaccgggggaacttcctgtaccaggagtacgcccacctcagcgccaaggacgccggcctgtcggagcagtcgtccaacttcctgacgtccatcgagcacttcgaggacgaccggtgcatcagcttcacgtacaacacggcggagatcatccacttcctcaacaacctgaaggtgacccgggcccagaaccgggaggagtggcagaagctgttcgtctgcgacacctcggacgacatcacgaagacgcaggcgaacgcgatcaccaagtgcatcgcgcaggcgatcttcggctaccaggccgacttctccgccctgttccggacggagaaggagaagagcaagttcaagctctcgcaggaggagaaggtgacggccttcgaggagctctgccccacggagttcctcccgctgttcaacgccctcaaggcgatgtacagcgcctacctcctgacgacgatcatcaaggactcgaacggcgggaccatcagcaacgccaagatcagccagtacgacgcgtaccacaacgacctggcgaagctgaaggagctgatcaagcgggtcctggggaaggacgactacgacaccttcttcaagggggtgtactacaagaacaccaagctgtacaacaagcagaaggcggaggggtacaccgcctacaacctggggaagctgtcgtacgacgacttcgccaaggagctgaagaagctcatcatcaagctggagaagtccggcgtcctctccgccgaggacgacgcctgggtgcggcagatccccacccggctcgacaacgaggagttcctgcggcggctgcggacgtcggacaacgggagcatcccgtaccagctccacctggaggagatggacgccatcatcaagaaccaggggaagtactaccccttcctcctcaaggagaaggacaagatcgagtcgctcatcaccttcaggatcccgtactacgtcgggccgctgacgctgaagaacgcggcccgggacgcgtacgggaagccgcggttcgcctggatccagaagaaggagaacgaggcgcacacgcggatcctcccgtggaactgggaggacgtggtggacaagcacgccacggcggaggccttcatccgccggatgacggggaagtgcacgtacctctacgcggaggacgtgctccccaagtgcagcctcctgtaccaggagttctgcgcctacaacgagctgaacggggcccggtggaccacggacaacgaccagttcaaccggttctccgcggactaccgggagtcgatctacaacgacctgttcgtcatgcggaaggggaaggtcacgtacaagaagatcgagaactggctcgagcagcagggggagctgcacccgcacgtgcggggcggccagggcgagaacggcctggagagcaccctctcgagctaccacttcttcaaggacctcttcgagttcgaggtcctgacggagctgcagcggcaggtgatcgagcagatcatcctgtggaacacgatcttcgaggaccggacgatcctgaacgagaagctgaacagccggtcgttccagatggagttcacggcggcgttcaacaacccgctgaccgcggaccagatccagaagatctgcaagaagcggttcacggggtgggggaagctgagcaagaagctcctcacggggctcttcgtcgacatcgacggggagcgcctgacgatcctcgacctgatgatccacggggacgtcacggacggccggaagggccgggcgctgatcttccaggagatcgtcacgatggagcagttcaaggaggcgatctccaagaccaacgaggaggcgctctccaagtgcatcatcgacatcgacgatctcccctgcagcccggcggacaagcggacggtcaaccaggcgctgcgggtggtggaggagatcgcctccatcgccgcctgcgcgccctcgcggatcttcatcgaggtcacgcgggaggaggacacgaagaacaagggcaagcggacggacaagcggacgtccaagctggagatggggctgaagaagctccgcgacagcgagaacaccaaggccatcctggccgagctctcggtccacaagaacctggacgagaagctcaccctgtacttcgcccagaacgggaagtcgctctacagcggcaccccgctggacatcaacgagctgtcccactaccaggtggaccacatcatcccccagtcctacatcaaggacgacagcatcgacaacaaggcgctggtgctcgccagcgagaaccagcgcaagagcgactccctcctcctggaggactcgatccgccggaagatgagcaacacctggaacgccctgttcaaggcggggctcatgtcggagaagaagctgaacaacctcaagtgcagctccatcaccgaccggcggctcaagtccttcatcaaccgccagctggtggagacctcgcagatctgcaagtacgcgatgcagctcctcaaggagaagtatccgcactgcgagatcatcccggtgaaggccgggatctcgtcgggcatccggcacacgtggaacatcgcgaagtgccgggaggccaacgactaccaccacgcgcacgacgcgtacctcgcgtgcgaggtgggccggttcatccagctgcactacccgaagatctacagcaaccccaccgcctacaacaaggaggtgcgggggctgatccagagcaacatcgtgcactccgcgtcggagggcaacgggcggtaccggctgcccggggactccgggtggctgacctacagcttcgcccacaagaagaccgccgcgtgggactgcgacgcggagcgcgaccggctcctccggtacgtcgactaccccgactgcttcgtcacgcggatggcgtacatcgagacgggggcgttctggaagcagacgatctacagcccccacaacgagaaggcgaaggacctcatcccgctgaagaagcacctcgacaccaacaagtacgggggctacagcagcaagaagtacgcgatcttcttcgtgtacgcgagccagaactcgaagggggtgaaggagtgccacctctcggggctgctgatcgcgaagctcgccgtcgcgacggacaacgcgacggggaagatcgacatgcaccggctcatcaagctggaggagcagctggtggccgcgcggggcaccagcatccagatcctccagccgatcgtcttcaagaaccagatgatcgagttcggcaagcgccgggagatcatcacggggctcaaggagcgccggaacgcgaaggagctcgcgttcaagcagcagcacatgcggctgctgaagaagtggaacgacgacatccaggaggaggggcggaagacgacggaggtcatcgacgaggacgcgcagctgaacgagatgttcgacctcatcctcggcaaggccgaccactgcgcgccggcgctgcacaacaagctgctgaacatcgtcggcgccgacgtcgacgactacgcgcggatcgagcagaagttcgccgcgatctcggacaaggacaccaagaagcgggtcctgttcaagatcatcagcaacgccaacgcgcaggagaaccagatcgacctcacggcgatcgaggggtcgaagcatttcggcgtcatctcggactggccgaagaagttcgacatcatcgagcagtcggtcaccgggatgttcgagaagcgcatccacatcgggatctga

SEQ ID NO: 179 - DNA, 4203 bp, synthetic construct
  source 1..4203: mol_type = other DNA
atgaacctccggaaggcctcggactactccgtgggcctggacctggggaccgggtccgtggggtggtgcgccgtcgacaacgacgggtacctctacagcttcaagcggaagcccacctgggggtcgcggatctacgggtccgcggcccccgccgcggacgcgcggcagttccggtcgctccggcggcggtacgaccgccgccggcagcggctgaacctcctccaggagctgttctcggaggagatgtaccacgtcgacccggacttcttcatccggctcaaccagagccagctcctgaaggaggaccgggacgagacgtgcaaggactacgcgtgtccgctgttcaagacggcgatcgacgagaagcagtactacaagacctaccccacgatctaccacctccgggcggcgctgatgcacgccaaccagaagatggacctccggctggtgtacctcgcgctgcacaacatcgtgaagtaccgggggaacttcctgtaccaggagtacacccacctcagcgcgaaggacgccggcctgagcgagcagagctcgaacttcctgacgtccatcgagcacttcgaggacgacaggtgcatcagcttcacctacgacacggcggagatcatccacttcctgaacaacctgaagcccacccgggcccagaaccgggacgagtggcagcggctgttcgtctgcgacacgtcggacgacatcacgaagacgcaggcgaacgccatcacgaagtgcatcgcccaggcgatcttcggctaccaggccgacttctccgccctgttcgggacggagaaggagaagagcaagttcacgctctcccaggaggagaaggtgacgaccttcgaggagctctgccccacggagttcctcccgctgttcaacgccctcaaggcgatgtacagcgcctacctcctgaccacgatcatccgggggtccaacggcgggacgatctcgaacgcgaagatcgcccagtacaacgcgtaccacgacgacctcgccaagctgaagaagctggtgaagcggatcctcgggaaggacaagtactacacgttcttccagggggtctactacaagaacacgaagctgtacaacaagcagaaggccgaggggtacacggcgtacaacctcggcaagctgtcgtacgacgacttcgccaaggacctcaagaagctgatcgaggagctccggaagaacggggtcctgtccgccgaggacgacgcctgggcgcagcagatcccgacgcggctggacaacgaggagttcctccggcggctccggacgtcggacaacgggagcatcccgtaccagctgcacctggaggagatggacgccatcatcaagaaccaggggaagtactaccccttcctcctgaaggagaaggacaagatcgagtccctcatcaccttcaggatcccctactacgtggggccgctcaccctgaagaacgccgcccgggacgcctacgggaagacccggttcgcctggatccagaagaaggagggcgcggagaagaagcgcatcctcccgtggaactgggaggacgtggtggacaagcacgccacggccgaggccttcatccggaggatgacgggcaagtgcacgtacctctacgccgaggacgtgctgcccaagtgcagcctcctgtaccaggagttctgcgcctacaacgagctgaacgggacgcggtggacgacggacaacgaccagtacaaccggttcagcgcggactaccgcgagggggtctacaacgacctcttcgtgcggtccaaggagaaggtcacctacaagaagatcgagcactggctcgagcagcagggggagctgcacccgcacgtcaagggcgggcagggcgagaacggcctggagtcccggctcagctcgtaccacttcttcaaggacctcctgaagttcgacgtgctgacggtgcagcaggagaaggtcatcgagaagatcatcctctggaacacgatcttcgaggaccgggcgatcctcaaggagaagctcaaggcgcagagcttccaggcggagttcaccgccgccttcaacaacccgctgaccgcggagcagatccagaagatctgcaagaagcggttcaccgggtggggcgagctgagcaagaagctgctcaccgggctctccgtcgacatcgacggggagcggctcaccatcctggacctgctcatccacggggacgtgacggacgggcgggccgggcgggccctgatcttccaggagatcgtgacgatgaagcagttcaaggaggccatcgtgaaggccaacgagaaggccctctcgacctgcgtcatcgggatcaacgacctgccctgctcgcccgccgacaagcggacggtcaaccaggccctccgcgtggtcgacgagatcgcgtcgatcgcgagctgcgccccctcccggatcttcatcgaggtgacccgggaggaggacaccaagaacaagggcaagcggacggacaagcggacgtccaagctggagatggggctcaagaagttccgcgacagcgaggacacgaaggccatcctggccgagctctcggcccacaagaacctggacgagaagctcacgctctacttcgcgcagaacggcaagtcgctgtacagcggcacgccgctggacatcaacgacttgtcgcactaccaggtggaccacatcatcccgcagtcgtacatcaaggacgacagcatcgacaacaaggcgttggtgctggcgtccgagaaccagcggaagagcgactcgctcctgctggacgactccatccggcggaagatgtcgaacacctggaacgccctgttcaaggcggggctgatgagcgagaagaagttcaacaacctcaagtgctcctccatcacggaccggcggctcaagagcttcatcaaccggcagctggtggagaccagccagatctgcaagtacgcgatgcagctcttcaaggccaagtacccgcactgcgaggtgatcccggtgaaggccgggatcagctcggggatccggtacacgtggaacatcgcgaagtgccgggaggcgaacgactaccaccacgcccacgacgcctacctggcgtgcgaggtgggccggttcatccagctgcactaccccaagatctacagcaaccccacggcctacaacaaggaggtccggggcctgatccagagcaacatcgtgcactcggggtccgagggcaacgggcggtaccgcctgcccggggactccgggtggctgacgtactccttcgcccacaagaagacggcggcgtgggactgcgacgccgagcgggaccggctgctgaagtacgtcgactacccggactgccacatcacccggatggcctacatcgagacgggggccttctgggaccagaccctctactccccgcacgcggggaagaaggacctgatcccgctgaagaagcacctcgacacgcacaagtacgggggctactccagcaagcagtacgccctcttcttcgtgtacagcctgcagaagaagaagggcaacaaggagtactgcctgagcgggctcccgatcgcgacgctggcggaggccacgcacaacaccaccgggaagatcgacatggaccggctggtgcagctggaggagcagctgatccagctggagaagcagttgatcaccacccaccacgccccgatccagatcgtgcagccgatcgtgtacaagaaccagctgatcgagttcaaggggcgccgggagatcatcaccggcaagaaggagcggcggaacgcctgcgagctggcgttcaagcagcagcacatgcggctgctcaagatgtggaacggggacctgaaggggaagtaccgggagaagaaggaggacgtcgacgaggactgcctcctgaacgagatgttcgacctgatcctggagaagaccagccactacgccccgatgctgcacaaccggctgctggacatcgtgaacgccaacgcgaacgactacagccggatcgagatcatcttcgcggccatcaaggaccagaacgtgaagaagtcggtcctgttcaacgtgatctcgaacgcgaacgcgtccaagaacatgatcgacctcaccgccatcggcgggagcgccaacttcggcgtgatctcggacaagccgcagcagttcgacatcatcgagcagtccgtgacgggcatgttcgagaagcggatccacatcggggtgtga

SEQ ID NO: 180 - DNA, 4209 bp, synthetic construct
  source 1..4209: mol_type = other DNA
atgaagaagatcttcagccagcagggccagaactactacctgggcctggacatcggcacggacagcgtgggctgggccgtgaccgacctcaactacaagctcctgcgggtgaacaacaagaacctgtggggcgtgcggctcttcgacgaggcccagcaggcctcggcgcggcggctgcagcgggagagccgccgccggctggagcgccggcggctgcgggtcaacctgctgcagcagatcttcgcgcccgccatcaacgcgaaggacagcaacttcttcgcgcggctggacgactcgaacctgtacggggaggacaagcgggagaagaccaagttctccctgttctccgacaccaacttcacggacatcgacttccacaagaagtacaagacggtgtaccacctgcgggcggccatgatgtccgaggccaacccggacccccggatggtgtacctggccctgcaccacatcgtgaagtaccgcgggcacttcctcatcgagggggagtccatgaacgcggtggagaacatcgcgatgccgatcgaggagatcaagcggtacctcgcggaccgggacgagtcgaactgcaacgactgcttcgacttgtccaagaccgacagcttccgggagctgttggtccagaaggtggggaagaccaccaaggcgaacagcctggcggagtgcttctcggtggagaagcacaacaagaagttcctcaccgtgctgaagctggtggccggctgcagcgtgtcggtgaaggacctgccggtcgagtgcgacgacgagaagctgaagatctgcttcgacggcgactgggagaaccaggagaccgtcctgcgggaggccctgcaggacgactacgtgctcatcgagaacgcgaagctcctgttcgactactcccagttcaaggccatcctggggaaccacaagtacctctcccaggggatggccgagaagtacaagaagcacgaggacgacctcaaggccctgaagtacgtcctccggaagtacttctccaaggagaagtacgacgacatgttccggaacgcctccgacaacaaccacacgaactacaccgcctacagcgggcgggtgtcgttcggccggaagaacggcaagaaggtggtgttggaggtgaagtcgaactcgcgggagtacgacgacttcatcaagtacgtgaaggaggtcctgtcgtcgtcggagacggcgatgcaggacgaggtgtccaagcggatcctcacggacatcgagaagaaggagttcatgccgaagcaggtgagcaagaacaacgccaccctgccgtaccagctcaacctggcggagctggacgcgatcctcgagaacgcgtccaagtactccgagtacgccttcctcaacgagaaggacgaggacggcatctccgccagggtgaagatccggagcctgctcacgttccggatgccgtactacgtgggccccgtcaacaactcctccgggaagtactggatcgtcaagaaggacgacgggcggatcatgccgtggaactacgagcagaagatcgacctggagcagaccgagcggaacttcatcgagcggatgacgaacgcctgctcgtacttcccggaggagaaggtgctgcccaagtgcagcctcctgtacgaggagtacgtcttcctcaacatcgtgaacaagatcaagatcaacggggagcccatccccgtgtcgctcaagcagcgcctgagcgactactacgccgagaccggcgccaacaagctgtcgaagaagttcctcaagcggtggctgatcgaggagaacgtcgcgcagaacgacgacgacctccagatcgagggcttcgacgacggggccaccgtgcaccggcggacgttctaccagttcgtccagatcttcgggtcgaagcaggccgtcctcgagaacctcaaggacatcgaggagatcgtgaagtacgccacgatctccgggtcggagaagtccaacctggagaagtggctggtcaagaactacaagtacctccagaaggagcagatcaagcggatcaagggcctcacctgcaaggggtggggccggtgctcccagaagttcttgatcaccaagttcggcaccaacccggagaccggggaggtgaactccctgtccgtgatggacgtgctccgggacaccacgctcaacttcatggagctctggaacgacgaggtctacggcttctcgaaggccttcgactcggagaacaacaagtcgtacgagggcatctcgtactcgatcgtgggggagctctactgctcccccgcggtcaagaagcagatctggcaggccctcaccgtggtgaaggagctccggggcatcctcgggtgcgccccctcgaagatcttcgtcgaggtggcgcgcggctccgacagcaagaaggacaagctggaggagcggaagcgcaccacctcgcgctacgagcagctgaagaaggtcttcgaggacatccgccggcagaacgacgcctccctggcggaggacgtctacgacaagttcgtcaaggtcggcgagcggaaggagaagctgcagaaccagaagctctacctgtacttcctccagaacgggctggacgcctacacgggcgagcccatcgactacaaccacctcgagctctacgacaaggaccacatctacccgcggtccaaggtcaaggacgacagcatccacaacaacctggtgctgacgtaccggccgcagaacgcggtcaagcgggacgactacccgatctcggagaagatccggaacaacccgaaggtgaaggccctctggaagaccctgcgggcgcagggcctcatgaccgaggagaagtacaagcggctgacccggacgaccgagctccgggacgacgagatggcggacttcatcaaccgccagctcgtcgagacccggcagtcgaccaaggaggtcatcggcgtcctcaagcgggtcttcgcggactcggagatcgtctggtccaaggccagcaacgtctccgacttccgcgcgctcccgaagcgcatcggggaggtgtcggtgccgcggttcgtgaagtgccgcgagctgaacgatcttcaccacgcgaaggacgcctacctcaacatcgtggtgggcaacaccttcaacgtccggtacgggcacaacgccaagtactgggtgaaggagcaccccaccgagaagctgacgtcctccgcgaagatctacgagtgcgacgtgaagacccagaaggtcaccgcgtggatcgcgggggacaacggcacgatggcccaggtggagaagacgatgcggagcaacgccgtcctcttcacccgggagtcgaaggtggcgaagggggcgctcttcaacgccaccatcgagaagaaggacgagaagggcgagaagaacctcgtcccgctcaagaactgctccagcaactgcgggaagcgggccaagatgagccagacgtccaagtacggcgggtacaacagcgagtcccgcacgtactacatgctggtgaagtacgtggagcgcaaggagcgcaagaaggggaccgtggagaaggtcaagtacaagttcctgggcgtcacggcgaaggacgcccacatgctcacggacgacgccagccgcgtggagtactgcgagaacttcgggctcgcggagccgatcatcctgctggacaagatcaagatccacacgatgttcgagttcgaggggacccggctcaccctcgccgggatgaccgggaaccggctcgtgtggcgcctcgcccagcagaacgtgcaggacgaggagaccgagcggtacctcaagaaggtcatcaacgtcctggagaagcggaagaaggacgcggactacaagatctgcgacaaggacggggtgagcgaggagcagaacctgatcctctacaacagcgtggtggacacgctgttgtccccgaagtacgcggggagcgggtccctggtgagcttcgccaagaagctcagcgccacgaacctcatggacaagttcaaggagctgtccgtcgagaagcagtgcgtggtgctgggcgagatctgcaaggtcctgcagtgcaacgccctcgcgagcgacctctcgctcctgggcgagggcaagacctgcgggaagatcctcacccagtccacgctcgacaacctcgacgagatcagcgtggtgcaccggtccgtgagcgggctcttcgagaagaagatcccgctctacgtgttcgacaagtga

SEQ ID NO: 181 - DNA, 4263 bp, synthetic construct
  source 1..4263: mol_type = other DNA
atgaacgagaagcggccctactacatcgggctggactgcggcaccaactcggtggggtgggccgcgaccgacgagaagtaccaccttctcaaggggacgcggcgcatcaagaacgacaagggcctgaagaccaagaagcagacgctctggggcttccggctcttcgacgaggccaacacggccgcggagcgccgcgtccagcggtccacccggcgccgcggggcccgggcgaagaaccgcctgaagctcctgcggatgctgttccgcgacgagatcgcggaggtggacccgggcttctaccagcggctgaaggagtccttctactacgaggaggacaagcggctgcggcggaacagcaagaacacgctgttcaacgaccagaacttcacggaccgggacttccacgcggagtacccgaccatctggcacctccgccagtcgatcatcgaccccaagaacaaggacaagaagttcgacatccgcctgtacttcctcgccatccagcacatcctgaagcaccggggccacttcctcctgcaggggaacatcggggacggcggggccgacttcctcccgctgttcgacgcgttccgcgacgaggcggagcgcctcgggtgccgcatcgcggacgtcccgaacgaggtgggggcgcttctcatgaaggagtcctcgaagacggacaagaagaaggacctgaagaacatcctctacctcgagggcgacgagctcgacgaggacgcccccaaggggcaggccgagctggccgggctcctcgtcggctcgaaggtcaacctcaagaagatcttcgccatcgaggacgaggagaagttcccctactccttcgccgagggcgtcttcgaggacaagatcctggacatcgagcaggccatcggggccgagaacctcgacctggtgtacgccgcgaagaacatctacgactacgtggtgctgcacaacctgctcgggaagcacaagatgatctcggacgcgatggtcgtcaactacgagctccacgaggaggacctcgggaagctgaagaagatcttcaagccccacaaggagctctaccacaagctcttcaagacggagctgtacgacgagaagttcccgtcgtacgacgcctacatcgggaaggcgtacacccaggacaagtccgggcggaagtcctccaagtccatcaaccaggaggacttcaacaagcacctgcacaagctgctgacggagatcaagccgaagaccagcccggacctcctgccgctcgtggacgagctcctcgagcggacggagacgggggagaagtccaccctctccttcctgctcccgaagcagcgggggcaggccaaggggaccatcccgatgcagctccacgccaacgagctgaacatcatcctggagaagctccagcgggactacccgagcttcgccgtggaggtggccggcgagaagtcggagtacaacaccaaggcgaagaagatcctgaagatccacagcttccggatcccgtactactgcgggcccatcgtcaagcggaagtacgacgacaacgggaagctggtccccaaggggaagtcccagttcagctgggccgacgaggagatcagcgagctggtctacccgtggaacttcgacgagctcgtcaacaaggacgggcgggcccagaacttcatccggcggatgaccaacgagtgcacgtacctcctgggggaggacgtgctccccaagaactcgctcatctaccagaagttcatggtgctcaacgagctgaacaacctgaagatcaacaaccagcggatcgacaaccggctgaagcagcagatcttcgagtgcggctacgagaagggcgagctgaagggggacatcaccctgaagaagctcgagcggtggtgcaaggacaacagcctgatcgggaacaacgacgagctgtccgggacctcggaggtgaagaacctcccgaagtaccagacctaccaggacttctgccggatcctcggcgacgacttcgggcagaagtacacccagaccaagctcgagaagatcatcgagctgatcaccatcctgggggacgagaaggacatgctcggccgctcgatccagcgcgagctggactgcgacagcgagctcgcgaagaagctgagcaagctgtcgtacaaggactggggccggatgtcggccaagttcctggacgggatcgtggtgaacaaccacaccatcctggactacctctgggaggacaacaagaacctcatggagctcctcggccaggaggtggggttcgggaaggtggtggagcagtacaacgacaccaagctgcccgcctccgccaagatcaactaccaggacgtggtgaagctgtactgctccccggccgtgaagcggtcggtctggcagacgatcaagatcgtcaacgagctggtgaagaacatcggctgcgcgccggccaagatcttcctggaggtgacccggggcgaggaccccaagtccaaggggaagtacaccctcgcccggaagcgggacctcgagacgaagttcaaggccgtcaagaccgacaacgcgcgggcgatcctcgagcagctcgagggcttcgaggaccgggacctccagtccaagaagctcttcctgtacttctcccagatggggaagtgcgcctactcgggggagcccatcaacctggaggacctgaacaactcgcagctctacgacatcgaccacatctacccgcggtcgaagacgaaggacgacagcatcacccggaacctggtgttggtcaaggcctccctcaaccgggagaagaccaacacctaccccatctccgagtcgatccggggcaagatgaggggcatgtgggccgcctggctccgggcgggcctcatcaccaaggagaagtacgagcggctcgtgcgctccaccccgctcaccgacgacgagctgggcgggttcatcgcccgccagctcgtcgagacctcccagagcgtcaaggccatccgggacctcctgtcccggatctacccggccaccaagatcgtcatggtgaaggccgggcaggtgtcggagttccggcacctgatgggcggggacaagaaggacaagaccggcaacatctgccagaagggcaagtacgagttcatcaaggtccgggacctcaacgacctgcaccacgcgaaggacgcgtacctgaacatcgtggtggggaacgtcatgcacgagacgttcaccgacaacccctacgagtggatcaagaagcgcgaggggaaggagtactccatccgccccgagcgcatcttccgcgagtcccagacctaccagctgtcggacggccggcagacctcgtaccccaaggtgcggggctgggacttcgcggagtccaccaagatcgtgtccgacacgatgaagcggaacgacgtcatctgggcccggatgaactacgtcgagtccaaggagatctcggacctccagctcgtggggaagggcgggaagtccgagaacctcctgcgcatcaagcgccaggaccgcctggaccccaagaagtacgggggctacaactccctcaagggggcccacttcgccctcatcgaggccaagaacaagaagggcgaggtggagcggcggctcatccagatccccatcatcgcccggaacgacgtggagaagtacgtgaacgagaactaccccggggcccaggtgatcatctcggtcatcaagatcaagagcaagctcaagatcgaccacatcccgatctgcatcatgaacaaggactccgagagcaagaacgggtactgccacgccctgcaggccctgttccccgccaaccacaactactacctgaagaagatcagcgcggtggtgaagaaggaccagctcgcgcggtccaactacgagatctcggagcgggacgaggtgaacatcgaggggaacctcgccatctacgacctgttctgccggaagctcaacctgtactccggcctcccggagctggccagcgtgatccccaagatcctgtccagcaaggagaagttcgcgcggctggacctcaagcagcagtgcctgaccctcagccagatgctcaacatcctgagctgcgggccccagaacgcgaagctggggaacatcgggtgcggggacaacgccggccggatccggatcagcaacgacaagctgttcaagttcaccgagctctacctggtgaaccagagcccgacggggctctacgaggagatcatcgacctcaagaccgtgcagcccaagaagtcctggaaggcggcctga

SEQ ID NO: 182 - DNA, 4281 bp, synthetic construct
  source 1..4281: mol_type = other DNA
atgaaggagaagcagccctactacatcgggctggactgcgggaccagctcggtggggtgggcggtcacggacgagacgtaccgcctgctcaaggggacgcaccggatcaagtccgacaactccaccaagaccaagcggcagacgctgtggggcttccgcctcttcgacgaggcggagaccgcggtggagcggcggacccaccggtccgcccgccgccgcggggagcgggccaagacccggctcaagcttctccggatgctcttccacgacgagatcgccaaggtggaccccgagttctaccagcggctcaaggagtcgttctactacgaggaggacaagaacctccagaagaagagcaagaacacgctcttcaacgactccaacttcaccgacaaggacttccacaagaagtacccgacgatctggcacctccgccaggcgatcatcaactcggacgacagccagcacttcgacatccggctgtacttcctggcgatccagcacatcctgaagcaccgggggcacttcctgctctcgggctccgtcggggacgggggcatcgacttcgagaacctcttcgagtccttccggaccgaggcggagcgcgtcgggtacgacatcgcggacatcccggaggaggtggagaacatcctggccaagaaggccagcaagaccgacaagaagaaggagctcaaggagatcctctacctggagggggacgacctcggggaggacgtccccaagggccaggccgagctggccgggctcctggtcgggtccaaggtggacctgaagaagatcttctcggcggaggacgacgagaagttcccgtactccttcaacgagggggtcttcgaggagaagctccccgagatcgagcaggcgatcgggccggacaacctggacctgatcttcgcgtcgaagaacatctacgactacatcatcctgcacaacctgctcggggagcacaagatgatctccgacgccatggtgtcgaactacgacctccaccagagcgatctcaagaagctgaagcaggtcttcaagccccacccggagatctacacgcagctcttcaaggacaagaagcacggcacgtacgacaagaagagcaaccggttcgacgcgaacaagaactcgtcgtacggcgtgtacgccgggcgggactaccaggccgagggggaccggaacgggcacatcaccacgagccaggaggacttcaacaagtacctctacaagctcctggaggagatcaagcccaagtccctcccggagctcacgtcgctcatcgacgagctcctggaccgggcggacacgtccgagaagagcatctcgcccctgctgctgcccaagcagcgggggcagaccaaggggacgatccccatgcagctccacgcgaacgagctggggctgatcctggagaagctccagcgggacttcccctcgttcgcggagatcgtgagcggggaggacgagtcctacaacacgaaggcgaagaagatcgccaagatccacgagttccggatcccgtactactgcgggccgctcgtgacgtcccggaagtcccagttctcctgggccgacaaggagatcctggagctgatctacccctggaacttcaactacgtgatggggaagaccgggcagatcgactcccgggcgaacgccttcatccggcgcatgaccaacgagtgcacctacctcgtgggggaggacgtcctccccaagtgcagcctcacgtaccagaagtacatggtgctcaacgagctcaactcgttgaaggtcaacgggcaccggatcgacaacgagctgaagcagaagatcttcgagcgcgggtacaaggggtcggagatcaaggggaacatcaccctgaagaagctcgagaagtggtgcaaggacaactccttgatcgggtcgaacgacggcctgagcggcgccaacgaggtcaaggtgctgccgaagtaccagacctaccaggacttccagcggatcctgggcatcgacttcgagaagaagtacgccctggacaagctggagaaggtggtggaggccatcaccgtcctgggggaggagaagacgatgctcaagaagaacatcgagcgcgagctcggctgcgacgacaagacggccaccctcctctcgaagctctcctacaaggactggggccgcatgtcggccaagttcctggacggcatcaccatcaagaaccggaccatcctcaactacctctgggaggacaacaagaacctcatggagctgctggggcaggaggtcgggttcagccagatcgcggacgagtacaactcgaccaagcggccggcgtcgacgaaggtgtcgtaccgggacgtcgacgggctgtactgcagcccggccgtgaagcggtcggtctggcagacgatcaagatcgtcaacgagctgaccaagaacctggggtacgcccccaagaagatcttcctggaggtcacgcgcggcgaggacgagaagtccaaggggaagtacaccctggcccggaagaaggacctggaggccaagctcaaggccatcaagaccgaggacgccgaggcgatcctcaaggagctgaactccgggaagtacgaggaccgggacctccagagcaagaagctcttcctgtacttctcccagatggggaagtgcgcctactcgggcgagcccatcgacctcgaggagctcaacaactcgcagatctacgacatcgaccacatctacccgcggtcgaagacgaaggacgactccatcacccggaacctcgtgctggtcaaggcctccctgaaccgggagaagaccaacacctacccgatctcggactccatccggtccaagatgcacggggtgtggtcgatctggtaccagaagggcctgatcaccaaggagaagtacgagcggctgatccgggtggccccgctgacggacgacgagctgggcggcttcgtcgcccgccagctcgtcgagacgtcgcagagcatcaaggccatccgggacctcctcaagcgggcgtacccggagaccaagatcatcatggtcaaggccgggcaggtctcggagttccggcacctgatgtcgtccgacaagaaggaccgggacgggaacgtctacgagcggggcaagtacgagttcatcaaggtgcgggacatcaacgacctgcaccacgcgaaggacgcgtacctgaacatcgtggtggggaacgtcatgcaggagacgttcaccgacaacccgtccgagtggatcaagcagcgggacgggaaggagtactccatccgcccggagaagctgttccgggcgagccagaagtaccagaaggccaacggggaggagaccatctaccccgaggtgcgcggctggaacttcgcggactcgatcgagatcgtgtccaacacgatgaagcggaacgacgtcatctggacgcggatgaactacatcgagtccaaggagatctccgacctccagctcgtcgggaagggcgagaactcggacgggctgctccgcatcaagcagcagaagcggctgaacccgaagaagtacgggggctacaacagcctcaagggggcgcacttcgccctcatcgagtgccgggacaagaagggcaacatccagcggcggatcgtgcagatccccatcatcgtcgaggacaacatcgagaagtacgtcatcgagtcctacaacgacgcgaaggtgatcctgccggtcatcaagtacaagtcgctgatcaagatcaacggcttcccgatgcacatcagccgcaagggcggcgaggtggccatcgggttctaccacgccgtgcaggccttcgtgccgtccaaggacatgaagtacctcaagaagctggtgaacttctccagcaagtacaagcagatgcacgacaagaacgaggtgaacatggagaaggagcccatcgacaagggctgcaacgagcagctcttcaagatcttcctgaagaagctcaaggcgtaccggaacatgccggagctcggcgggaagatcaacgagatcgaggactgcaagacggacttcgacaacctcaacctccgggaccagagcctggtcctggtggagttcctgaagatcctgtcctgcggccccgagaccgccaacctgctctccttcgtccccaaggcgggggccgtggggaaggggaagttcaacgacaacatcctgaactacgactcctccttcctcatcaaccagagcccgacggggctctacgaggaggtggtggacctcaagacggtccagtccaaggcccagaagggcaaggagtcgtga

SEQ ID NO: 183 - DNA, 4320 bp, synthetic construct
  source 1..4320: mol_type = other DNA
atgaagatcttcgtgtccatcgaccagggcgcgaagaacaccgggctggtgctggccgaggtggacagcaacggccagctccagaacctggaggggaacgtcgtctcgatcaacgagaacgagttcaagaccagccagctggaccggcgcaccaagcgccaccagcggcggcgctacaagcgccgcaagctggccaagcggctgctccggctgatcctggagaaggagttcggctggaacttctccaagaagtgcatcaagcagaaggagttcatcttcgggctcctgaaccggcgcgggttctcctacatcgtggaggacctcgacgtcgagaccctcaacaacgaggacttcatcgacttcatcgtcaagctgttccccgaccagctcaacaaggacgagaagttgacggagcagatcgagaagaactactccaacccggagtggttcaagtcgatcctggacaacccgaactccaagttcgtgtccgggaagaacaagaactccaacgagcagacgctcgaggggtactgcaaggacaagaacctgaagtactccaaggagcttgagcgcttctacaacaagttcatcgggaccatctcgcagttctacgacgagatgtccgggggcgccaagcaccggaagaagtacttcgaggagatcaagaccgtgatctacaactcgaaccccctggacgagatcttccgggggtcgaagatcgacgagaagaagttcttcaagatcgtcgcccacatctcgaacttccccctccgggtgctccggaagtacttcaacgacaagaagatgaaggacgggggctactgggacgacaagcgcctgaagaagatcttcttgcgggaggtgcgctcgtggcacacgagcgggaacaacgagctgaagaagcggcggaagcggctcatcagcttgttgacggaccccaacaaggggatcctcgagttctggttcgagctcgaccccatcgagacgatcccgccctacgaggacatgaacaaccggaacatcccgctgtgccagacgctgtacctcgaccccgagaagctgaacgagaagttcaaggggtggaaggccatcctcaacaagctcctcgaggaggagaaggactccaagatcaaggaggggctgctggagaacaagtgggacagcatcgagaagcacaagatcttctaccacgacctgtacaagaagtgccacttgaagctgaagcccaagatctccaaggacgacctgctggcccggaccctccagcggttcttcgaccgggtgcgggacaaggacccgtacaagttccggctgatcgccctgtcgaagaaggtggactccgacgagtacaaggacgccatcaacaacctgaagaaggtgatctgcgagaacgagatcgagatcctgaaggggatcgcgaagacgtactacgcggagcaggagaacgccaagaagggcctctgggacgagaagaactcgatcctgaagaagtgcaacctgcacaccaagcacaagatcaacctgtcccacatcatcatcggggacatcctggacgtccggatgtccccgaaggagacggaggacttctacaacttcctgaagaacacccggatcgagcggaagacgctcatcgggatcgcgtccgagtgctcggagatcctgaagaaggaggggaacaccctccgggccagcctggagacggtgctctactacaacaacaacgagcgggagctcgacaagaagcaggagtacctcttcaagatctacgagctggtggagaagggcgccaaggagatcggcaactacctggggaagaacaactcctcccggtacgccgacatctggtccttcgcccagatctacaacgtgctggagggggaccggcacggcttctccaagatctgcgagatctgccacgaggagaacgccctccggtccagcgtcatgaacgaggagggggcgacgttcacccgcctcttcgcggacagcgtccgccccttcgacggggtggtcgcccgcctgatcagcaagcaggcggacgtcatcagcgggctgatcatcaagaagatcggctcgctgaaggtgaacaacgacgaggagatcaacatctccttgatcgcggagcagaacgagttcctcttcgaggaggagctcagctccctgaaggggaagacctccgacaaggacaagtcggagtacgactccatcttcaacaacaagctcgagcggatcaagagcttcaacacctactgcccctacacgggggagaagatcggggacaacggggacatcgaccacatcctcccccggtcgtggaccaagcgggtctacggcgccatcttcaacgacgagatgaacctgatctactcgagcacccgggggaaccgggagtccaaggccaaccggccggacgggctctgggacttcgagaacctgtcggactcgttcctctcggagctgtacgacgggatcacggaccgggagaccatcaagaacacgatcaacaacacgctcgagaagctcgggatcctgaacggcgagcggaaggacaagatcgtgttcttgcggctggacaaggacacccagcgcgacctcaaggtcgcgctgttcaccccggagttccgggacaagctgatcccctacctcaacaacagcctgagcgcgaaggtgaacgggacgcaggcctacctgctcaagctcatcatcaagcggctgcgggagaagtacccgaacctgaaggccaccatcagccgggtggactcctccctgatccagaagttccggaacgacatctccaaggaggacccggccctgagcaagaaccgggagaaccagtccctgtacagccacacggtggacgcgtccatcgcgctcttcttcaacacggaggagagcgacttcaagcggtgcctgccgcccgggatcaagatcatcgaggcgaaggcccgctcccagatccacaagatcaagaagggggacttctactccacgtccgtcttcaaggacgggatctacggggagaagttcgtccccgtgatcctgttcaaggagaagctgtacttcggcttcgacacgaagaactgcgtggagatcctgaacgagaaggagacgatcttcgacctcctcaagccgtacctccggtaccggaacgacaacaagaagatcgtcaaggccttcgagaagtccttcgaggactggaagaacatctcgaagaacaagttcctccgcttcttcgtggacaagatcgccgccttcgagttcttcgagaaggtggcgaagcagccctccgacgacatggagaaggtgaccttccacctgctcgaggggctgcggtacaccacgcagaagatcgagatcatgtcgctgctgatcgacagcaacggcaagaagtacaagaccaaggagaagatcctctccaaggagaacttcaacatcgagatcaacatctcgcccctcaagatcgagaacgaggacatcaagatcgaggggagcctcaccttcccggcccggacgttcctcgagaagatcgtggactcggacgagatcaagaacaagctcgggaacgacgtcaagaacaaggaggaggacttcaagtccatcaacaagttcttgaagaacctgtacgggcggaagaacgagtccgacccgcgggtgaaggcccggaaggtcttcagcgtggacatcatcaagaacccgtccggcgggttccgcatcaagcggaagacgccggacgggacgatctaccagctcgtggagatcaaggaccgcgccacgatcgggttcgaggtgcgggacgggaagatcgacaagaactccgcgatcctccaccccgtcctgtacaacgaccggaacatcgtgccggtcggggctctctacaaggagagccccaagaacagcgtcctcatggacgactggcgggagatcacgctggaggatgacgagaagaagttcatcaaccggctgtgggtctgcccggggaccaagagccggtcctactaccggatcgagctcttgacggagcagttcaagaagtccctcttcaacaacatcacctcgttctccatcagccaggacaagcaggacgagttctacaagatcctgcccctgaagctgaagttcgatctggacaagatcgacttcctcaaggacgacaagatccggaagatcctcgtcggcccccggtcgtccgagaagaacaacatcaagcaggggtcgatgatcgtcttcgaggccacctcggagcacatcaccctggagtacgaggcgaacggcttcatgccggaggaggcgcagcggcgctacctcgaggtgaagaagtga

SEQ ID NO: 184 - DNA, 4359 bp, synthetic construct
  source 1..4359: mol_type = other DNA
atgaactcgaagctgatctgcccgatcgccatcgacctcggggcgaagaacacgggcatcgtctcggggtcgatcaccgacaaggcggagttcagcttcaagggcgcggtcatctccgtggacgacaagacgtcctggagcatgaccgaccggaccgcccggcgccaccagcgccgggggatcaagcgccggaagatggcgaagcgcctcttctggctgatcctgctccacgagtacgagatcaagtacaagaacctcacggtccggcagcaggaggccttcaacggcctcttcaaccgccgggggttcaccttcgcctccggcggggacgagaacaaggagcgggacgagatcatcaagagctccgagatcgagatcatcaacatcttcgagaacaaggtgccggagctcttcgccgacaagaagggcgacctgctcgaccggatcagccagaaccagaagctgccggagagcatcccgttcttcgagcacaagctcgacaagtccgtcttccgcgactgggcgaaggagagcaacctcatcgaggactccgagatcgaggagctctccaagtccttcgagaagacgtacaaggccctgaaggactactaccagtccgccctgcgggagcagatgggctccaagcaccggcgggagtacctggtcgagatcaagaaggacatcgacacgtacttcaagaacgaggacctctcgttctcccgcctcttcgagaagaaggtggacagcgagaagctgtaccgcctgatcgggaacatcagcaacctgcagctgcgggtgctgcggaagtacttcaaccagccggagggcgggtcgaaggagaagctccacatcgacatctgggacaaggagaagctccggatcctgatctggcggtggatcgagtcctggcacgtggacaagaacgagggcgagatccggcagtaccggtccgagatgcagtcgaaccggaacctgaagaagggcgggaacatcatctcgttcctgaccgagatctcgcccgagaagaccatcccgccgtacgaggaccagaacaaccgccggccgcccgagtgctccagcatgcacctggacgcggagaagctggacaagctgttcccggggtggaaggagctctgctgcgtgatccacgcgaacttcaagacggacatcgacatggggaagatctactcggacgacacgtgccgggaggtcaacatcgagaacagcaaggagctgtgcctgctcctgcagcggtacctcgaccgctccatgcggctcgactcgctcgagatccggaagatcgtgagcaagaacgagaaggagcggaagaactacatctcggacaagatcgagtcggtgctcgggaacaacctcaccaagctcctgtacttcgacctggcgcccaagtactacagcgagatccaggacgcccggaacgggctctgggacgagctgaaccacaacagcatcctcaagcggtgcgggaagaacccgccgcacaagaacaacatctcgcacctgctggtgggcaacatcctccagcacgacttcgacgagaagtcgtacatgaagttcatcgacgagtgctggaagacgcccatcaccgggcggaccacgctctcgtcgatgtgcgtcaagatcgaggacatccggaagcgctacgggaactcgttcaacgagttctacaaggagctcctggtgtccatcgagatccacaacaagaacgtgaagaacgagaagaagatcatcgagttcaagccgagcgacggcatcgagcaggacatctacgatgtctacaagcggatcaagcccgccagcgaggtgatctcgaagtacctgtgccacgacagcagcgtgagcgagaagtactccaacccgttcacgctcgcgcagctgtcgaacatcatcgacaaggacatccacgggttctcgaaggactgcaagatctgcagctacgagaacaagtggcggatgcagctgaacaagtacacgaccgaggacaagacggactactgcgccaacgcggtccgtctgtcctcggacacggtgcggccgttcgacggcatgatggcccggatcctggacaaccaggccgaggagatcgtcaagctgaagatcaaggagatcgacgagatcatcaagacgaactccaagtcggacctggtgatcccggtctgcatcgagcagaactcgttcaacttcacgagcgacctggccgacatcaagcggtcgagcaagcggaaggacctcctgaagcggaaggaggcctcccagaagcgggaggaggagtacttcaccaacaaggagcagcgcatcatctacgcgtccaaggggctgtgcccctacacgggggagcagctggacgtgaagggggagatcgaccacatcatcccccgcgccaagaccaagaagatcagcaacacgatcatcgaccacgaggcgaacctgatctactgctcgcggaagggcaaccagatcaagaaggacaaggagtactccctgtccaacctgaacgccaagtacctgaacaacctgtacgggacggcgaacacgaaggacatcgagacccagatcgagaccagcatcgagaagatcaagaagctgcggcagaccttcgtgttcaccgacctgtcggagaacgagcagcgggacttccggcacgcgttcttctgcgacaagctgaaggactcgctgctcgactacttggcgaaccagatcaaggcgcgggtcaacgggacccaggccttcttcgccaagctgatcatccggaagctccggaagcacctggagtccaaggggctccgggcggagttcatcgtgatcaagatcccgtcctccaaggagggcggggtctccttcatccggaagaagatcgcggagctccgggcggacatcgccaagcagccgatccagccgatctacagccacatcgtggacgcggcgtgcgtgctgtacctctcgttcaacgagaacgagatcttcaacaagatctcggcgcccgtggtcttcaagaccacggacgacatctcgctgttcgaggagatcctcccgaagtccttctcgatcgagaagggcgagaagcggaagatctacgagcgcgagacgaagatcgacttcagctcggtgcagatcttcaaggacgggatcttcgccgagcacttcgtcccggtgatcatcaacgccgagggcctgtccttcgggttcaacctgaagaaccggtccatctgcgtgaagaacgcggagctctggttcaacgagatcaaggactacctgaacctgaaggacatctaccgggacaagaccatcgaggagctggtcgtcctgtcggtgaacgggttcatccagatcagcttcgacaagacgaagtgcctggagctcctccagaaggcgagccgggacgtctcgctgtacagcgagaacgagtccaaggtgaagatcctggaggggctccggtacaccacggcccggatgaacctggaggacatcgtcttcctgaagaacaacaagaagatcaccgggatcgtggaggcgctgaagacggacctgttcaccttcaaggtgaacttcaagagcctgggcaaggacttcgggagcttccacgagctccagctgatcctgcccagcatcaacgaggcgaaggacttccacacgctgatcaagcggacctgcgacatcaccgacggggagatcgactactcggagttgttcatcaagatctacgacgagaagttcaacaactcccagcagtcgatctcctgtcggaagcagaagacgcggaagaccagcctccccgtcatcgcggcgccgtccgggggcttccggctccggcggaagaacaaggacgactcgtcgatctaccagctggtcgcgtcgaacgcgtacgtgagcggcttcgacgagaacctgaagaacatcagcatcgccaagcacttcagcaagagccggaacatcgccctcatctcggagttcaacaacttcgagaacatcaagacctcgatctcgctgaaccagtggatcacggtcgagcccttcgagccgtacatcgacatcatcgacgagatccaggcgtgcccggggaccaagtcccggttctacatcgtcctgaagctgaagaacgagacgttcctccgggacatggtcacgaaggagtacctcaactccatctcgggcaacatcctgaacgtgtacggcgtgatgaagaagaacgactacaagtcggacttcttcaagggctcgctggacaagccccgggagacgatcttcatcaaggagctgagcgacgactacatcaagctccggtacgaggcggagggccggaagatcaaggacctctacctcaagtccctgaagaacgggggc

SEQ ID NO: 185 - DNA, 3177 bp, synthetic construct
  source 1..3177: mol_type = other DNA
atgtccacgatgtcctacatcctgggcctggacctgggcgtggccagcgtgggctggtccgtgatcgagatcgacgagaacgagatgcccatccggctggtggacctgggcgtccggaccttcgagaaggccgaggtgcccaagaccggggagtccctggccaagagccgccgggaggcccggtccatccggcgcctgatcgcccggcgggtccgccggctgctgctggccaagaaggccctcctggaggagggcatcctgacccagaacgacttcctgaccaagtccatcatcaaggacctgcccatcaacgcctgggagctccgggccaagggcctggaccacaagctcaccagcaaggagtgggccaccgtgctgctgcacctggtgaagcaccggggctacctgtcccagcggaagaacgagtccgacaccgccgacaagcagctgggcgccctgctgtccggggtgaaggagaaccacaccctgctgcaggagaacaagtaccggacccccgccgagctggccatctgcaagttcgagaaggaggagggccacatccggaaccagaacggggagtacatccacaccttcgaccggctggacctgcaggccgagctgcacctgctgttcgagaagcagcggcagttcaacaacccctacgccagcgccaagctggaggagaagatggactacctgctgatgtaccagaagcccgccctgtccggggaggccatcctcaagatgctgggcaagtgctccttcgagacccaggagtacaagtgcgccaagaacacctacagcgccgagcggttcatctggctgaccaagctgaacaacctgcggatcctgacccaggggtccgagcggggcctgaccgagtccgagcgggccctgctgctgaaccagccctaccagaaggccaagctgacctacacccaggtccggaacatcctggagctctccgagagcgagatcttcaagggcctccggtacgggaacgtggaggacaagaagatgatcgagaaggagaccctgatggagctgaaggccttccaccagatccggaaggtgctggagaaggccaacctgaagaccgagtggcagggcctggccaccaagcccgagctgctcgacgagatcggcaccatcttctccctgtacaagaccgacgccgacatcaccgcccagctgcaggacaagatcagcgcccccatcctgaacgccctgctgagcgggatcaacttcgacaagttcatcaacctgagcctggtggccctgagcaagatcctgcccctgatggagcaggggcagcggtacgacgaggcctgcaccagcatctacggggaccactacggggtgaagaccaaggaggagcacctgttcctcccgtccatcgacaaggacgagatccggaaccccgtggtgctgcggtgcctgtcccagacccggaagatcatcaacgccgtgatccggctgtacggcagccccgcccggatccacatcgagaccgggcgggaggtgggcaagtccttcaaggagcgccagaagatcgagaagaaccagctggagaacaaggccaagaaggagcgggccatcaaggagttcaaggacctgttcccctacttcatcggggagcccaagtccaaggacatcctgaagatgcgcctgtacaacgagcagcagggcaagtgcctgtactccggcaagaccatcgacatcaaccggctgctggagaaggggtacgtggagatcgaccacgccctgcccttctcccggacctgggacgacagcttcaacaacaaggtgctggtgctggccaacgagaaccagaacaaggccaaccagaccccgtacgagtggttcgacgggaagaacaacaccaccaagtggcagcagttcgtggccctggtgtggggcagccacttcaactaccacaagaagcagcacctgctgctgaagaacctgcccgagggcttcatgaagcggaacctgaacgacacccgctacgtggcccggtacctgatgaacttcatcaacgaccacatccagctgaccggcaagggcaagcggcgggtgttcgccagcaacggccagatcaccgccctgctgcgggcccggtggggcctgatgaaggtgcggggcgacaacgaccgccaccacgccctggacgccatcgtggtggcctgcaccacccccagcatgcagaacaagatcaccgacttcgtgcggtccaaggagatgaacatcttctccggcgagttcatcgaccggaacaccggggagatcaagcagatccacttccccgagccctggaactacttccggaacgaggtgatgatccgggtgttcagccacgaccccctgctggagctggagcagcagctgcccagccggccggaggcccggcaccagtacgtgaccccgctgttcgtgtcccggatgcccacccggaagatgaccgggcaggggcacctggagaccatcaagagcgccaagcggctggccgagaacgagtccgtgcagcggatcgccctcaccagcctgaagctgaacaccctggagaacatggccaacaaggacaaggagaaggccctgtaccaggcgctgaaggagcgcctggagcagttcaacaacgaccccgtgaaggccttcgccgagcccttctacaagaagggcggccagcaggtgaagaagatccgggtgaagcagatccagaagaccggggtgatcgtgcaccaggggaacggcgtggccgacaacgcctccatggtgcgcgtggacgtgttcgagaaggccaacaagttctacctggtgccgatctacacctggcaggtggccaagggcatcctgcccaacaaggccgccatcgccaacaagaacgaggacgagtggcaggagatggacgagagcttcaccttcaagttctccatccatcccaacgacctgatcaaggtcaccaccaagaaggaggtgtacttcggctactacgtggccatggaccggcacaccgccgccatcaacatccgggagcccgacctggagcgctccaagggcaaggacgggctccaccggggcatcggggtgaagaccgccctgagcttcgagaagtacgacatcgaccccctgggcaagaacatccggccctgccagcccaaggcccggcagcccatccgg

SEQ ID NO: 186 - DNA, 4008 bp, synthetic construct
  source 1..4008: mol_type = other DNA
atggagcagaaggactacttcatcgggatcgacgccggcaccagctccgtgggctgggccgtgaccgatcccgcctaccacgtgatcaagaagcacggcaccgccctgtggggcgtgcggctgttcgaggaggcggccaccgccgagaagcggcggatggcccgctccgcccggcggaaccgggaccggaaggtgttccggctgaagctgctgcgggagctgttcgccgaggagatctccaaggtggaccccgccttctacctgcggctggacgagtccaagtactgggagaagaaggtggacaccaagtactgcctcttctccgacccccagttcaacgaccgggactaccaccggcagtaccccaccatctaccacctgcgggacgagctgatgaagtccgacgccccgcacgacgtgcggctggtgtacctggccgtgagccacctgatcaagcaccgcggccacttcttcctgcagatggacgaggacgtgtcccagcccgagttcggcgacggctggaccgccctggtggaggacctggagaccatcctcggcgtgcacatctcctgctgcgacctggacaagctgcagcaggtgctgtgcgacaagatgaccgtgcgggagaagcagaagcagctgaagaagctgatcaccgtgagcgacgcccccgacatgcccccgttcacctgcatccccgacctgctgagcgggaagacctgcgacgtcagcaagtccttcggcatcatgctggagggcgacgagaagaacgccctcaaggtgagcctgtccggcgaggacctctccgacgaggagaagatcgagacctaccagaagcacctggaggagaagctccagatcctggaggacctgaaggtcctctacgactggggcatcctggtgcacatcctgcacggctccgccagcatctccgaggccaaggtgaagagctacgagaagcacaagtccgacctgaagaagctgcagcggctgatccggcgggagtaccgggagaagtacgccgaggtgttccggcagaacaagaagaagctggacaactactccgcgtacaccggccactgcaagggcgtgaacgagcgctaccggtgcaaccgggaggccttctacaagtacctccagaagctgctgaagagctccaccagcgccgacgccaaggagatcatgtccgagatcgagatcggcaccttcctgcccatgcagcggaccaacgagaacagcgtgatcccctaccagatgaacctggccgagctgaagaagatcctggaccaggccgccggctacctgcccttcctgaacgagaaggacgaggccggcctgaccgtccgggagaaggtggagagcctgctgaccttccgggtgccctactacgtggggcccctggaccaccacatggccaaggagggcacccactgggccgtgaagaagcaccccgagcagcgggtgtacccctggaacttcgaggaggtggtggacctggagaagtccgccgagcggttcatggagcagctgaccaacacctgcacctacctgatcggcgagaccgtgctgcccaaggacagcgtggcctacgcccggttcatggtgctgaacgagctgaacaacgtgaccatctacggccaccggctgtccgtggacgtgaagcagcaggtgttcctggagctgttctgcgggaagaaccgggtgacccggaaggccttcctggagttcctgcggaaggagggcctgatccacaagggcgaggaggaggccgtgggcggcttcgacggggagttcaaggcctccctgaaggtgtggaaccggctgcgggccatcttcggggaggacctccccgacacggagcagatggaccagatgatcctgagcgtgctgctgctgaagcaggagcccgagatgctgaagagccggatcacccggctctaccccagcatcacccccagccagctgaagagcgtgtgcaagctgccctgcagcggctgggggcggttcagccgggagttcctgaccggcctgaaggccgacgtgccccagtacggcggcagcgactggtccatcctcgacgccctgtggaacaccgactgcaacctgatgcagctgctgtccggcgacatgccctaccaggccctgatcgaggcccacaaccgggagctgatgggggacgtgaagctggactaccagacggtcagcgggctctccgccccgcccgccgtgcggcggaccgtgtggcagaccctgcgcatcgtgcaggagatcacccacatcatgggcggggcccccaagaagatcttcgtggagatggcgcgggggagcgacggcagcaagcagaaggtctcccggaagaagcagctgagcgacctctaccagaagatgggcgaggagggcgccgagtggtgcgagaagctggaccagtacgaggacagccgcctgcgccaggacaagctgtacctgtacttcacccagatgggccggtgcatgtacaccggcgagcccatcgacctgcacgccctgctgaacgacgccggcaaccagatctacgacatcgaccacatctacccccggtccaaggtgaaggacgacagcctggacaaccgggtgctggtgaagaagaccgtgaacgtggacaagggggacaagtaccccatccagtccgagatccggcaggcccagaccagctggtggcgcaacctgcgcaagtgcggcctgatctccgagatcaagctggacaggctcacccgctccaccggcttcagcgaggacgagctggccggcttcatcagccggcagctggtggagacccggcagtccaccaagctgctggccgagatcctgagcaaggccctgcccgagagccggatcgtgtacgtgaaggccggcaacgtgtcctcgttccggcaggagaacaacatcgtgaaggtgcgggacctgaacgacctgcaccacgccaaggacgcctacctgaacatcgtggtgggcaacgtgtacgacgtgaagttcaccgccaaccccaagcggttcctgcggagcggggagccctacagcatgaagaccgacgtgctgttcgggcacacgatccggcgggggaaccagctggcctggacccccgactacctgcccgaggtcaagaagacctgccggcggaaccccatcctggtgacccggatggccgtccgccggaactccgggcggagcgggggcctgttcgaccagaaccccgtgcggggcgggaccatccccctgaagggggacccccgcatgcaggacaccaagcggtacgggggctacgacaaggagaccggcgcctacatgttcctggtggagcacggggagcccggcaagcggatccgcagcatggagcccatgtacctgcggtacgcccagcggatccaggacaactccgacgacctggccatctactgcaccgaggtgctgaagctgaaggaccccaacatcatcgtgcccgagatcaagttctacaccctgatggagtccagcggcttccggttctggctgaccggccggggcggggaccagatcctgggcatccagggcttccagctggtgctggacgagacctccgagagctacctgaagaaggtgctcaaggggtgccagaaggtgatgtccgccaagggccagatcgagctggaggagaaggccgaccgggtgaccaaggaggagaacaagaccctgtacgacgtgctgctggagaagatgcagctgcccatctaccggtcccggccggccagccaggtgcagaccgtgagcgccgggcgggagtgcttcgccgccctgaccctgaccgagcagtgcgtggccctgtccaacctggtgcagctgttccggggcaacgggcaggccgacctgaccggcatcgggggcagcaagaccgccgggtccatgaagttctccaagaagaccggcgccgacttcaagatcatctaccagtccgtgaccggcttctacagccacgaggagagcttcagcatctga

SEQ ID NO: 187 - DNA, 4251 bp, synthetic construct
  source 1..4251: mol_type = other DNA
atggccaagtacttcctcggcctggacatcggcaccaacagctgcggctgggccgtgaccgacgaggagtacaacctgatccgccgcaagggcaaggacctgtggggcgtgcggctgttcgagggcgccgtgaccgccgaggagcggcgccagaaccgcaccaaccggcggcggctggaccggaagaagctggagctgtcctgggcccgggacgtgttcgccgaggagatcgccaaggtggacaaggacttcctgacccggatgaagtacagcaacctgtgggccgaggacaagatcaagatgtccaacagcctgaagtccaaggacagcctgttccacgggcaggtggacggccgggactacaccgacaaggactactacatcgactaccccaccatctaccacctgcggaaggagctgacccaggagcccgccaaggacatccggctgctgtacctggccgtgcacaacatcatcaagcaccgcggccacttcctgtacggcggcaacttcggggacaacagcaacctgctggtgtccttcaacgaggccctggactgctacaagaagatcatcgaccaggaggactgcctcctgcacgtgaagaagctggaggagggcgacatcgccgagatcctggactgcatcaagtccaagtccggcatgcgcctgaccaaggccaagttcaacgagatcttcgacgccaagaccaagagccagaagatgctggtgtccgccttcgtggacggcaagatcaacctggagcagctgttcgagaccaagctcgaggagggcaagctggacttcaacgacgaggacatcgagatcaagatcaacggcctggagaacgtgctgagcgacgagcaggtgagcctgctgtacaagatccaggagatctacagcctgctccagctgaagtccatcctggccgaccacgagtacatctgcgaggccatggtggagtccttcgaggagcaccaccgccagctggagcagttcaagaagttcatcaagaagtactaccagaaggagtacttcaacatcttccggaacccccgggacaaggacagcgacaagaacgtgggctacgcccagtacgtgaactgcaacctgaccaacgggtccaagcaggtggtggacctgaacgtgtccaaccgctccaaggaggagttctacaagtacatcaagaagatcctgagcttcacccccaacgactgccaggacctggagcagttcgagaacgagcggaactactacctgtccctgatccaggaggaccggttcctgcccaagcagcggaccaagtccaacagcgtgttccccaacaagctgtacgagaaggagctgaagcagatcctgcagatctccggcaagaagttcgagttcctgaacgagatcgacaagacctgcgggctgaccaacgcccagaagctcctgcagatcctgaccttccgggtgccctacttcgtggggcccatcggccagaactccaacggccagaaccacggctgggccgagaagatcaccaacctggactacaagccgtggaccctgaacaagatcgtggacttcgacatggccgaggacgccttcatcggcaagatgaccaacaagtgcacgtacctgaaggacaaggacgtgctgcccaagaacagcatcatctactccaagtaccgggtgctgaacgagctgaacaagctcaagatcaacggcaacgacatcagcgtggagctgaagcagaacctgttcaacgagctgttctgcaacttcgccaaggtgtcctccaaggacgtgaagaagttcctgatcaaggagggcctgttcagcgccgacgagatcaacgacatccagctgagcgggatcgaccgggagttcgccaacaacttctccagctacagcaagctggccagcaactccctgttcgggaaggacttcatcgacgagcacctgatcgagatcgagaagatcatcaagtaccacaccgtgatcagcgacaagaaccggctggacaagcggctgcgccgggagttctccgggatcttcaacgaggagcagttcaagatcctgaagggcctgaacttcaaggactggggctccctgtcctacgagttcctgtgcgggctgaagttcgtgaaccgggagaccggggagatcacctccatcctggacgagatgtggaacaccaaccagaacctgcagcagatcctgaacaacgggtcctacaccctgagcgagtgcctgaccaagagcaacgagaagtccctgaagaacctggtgtaccaggacgtggagaacctgtactgctcccccgccgtgaagcgggggatctggcagagcgtgaagctgatcagggagatcgtggaggtgatgggcgagatgcccgagaaggtcttcgtggaggtgacccgcgaggacggggagaagggcgactccggccggaagtccagccggaaggagaagctggagaagctgtacaacagcaaggacttcaagaagaacgtcttcatctccagccaggagatcgcccagctcctgaaggagctgaacgacaaggacgtcacctccctgcggagcgagaagctgttcctgtacttcctgcagagcgggaagtgcatgtacagcggccagaccatcgacatcaacgacatctacaacgacaacctgtacgacgtggaccacatcatcccccagtccatcatcaaggacgacagcatcgacaacaaggtgctggtgaagcgccagctgaacgcccagaagctggacacctaccccgtgccctacgagttcatcagcaagcagaagggcttctggaaggtgctgctggacaacggcttcatctccaaggagaagtacgaccggctggtgcggaccagccccctgaccgaggacgacctcggccagttcatcgcccggcagctggtggagaccaaccagaccgtgaaggcggtgatcgacttcctgaaggtgtccatggaggatgaccggaaggtggtctacaacaaggccaagctggtgagcgagttccggcagatcttcagcatcaccaagtgccgggacatcaacgacctgcaccacgcccaggacgcctacctgaacatcgtggtgggcaacatcatcaacaacaagttcaccgacgacccccggaacttctacaagcagaagaagttcatgcccctgatctacaacaaggaggagaagatcacggagagcaacaacatcaagaaggtgttcaccggcgtggtgttcagctccgccagcacccggcccgtgtggagcgccacccgggacatcaacaagatcaagaagatctgccagcggaccagcccgctgatctccaagatgtccttcgccaacttcaacggcgccttctacaaggagaccgtgcacaagagcaacaagaacaacaagaagaccgaggccagcgtgtccctgaagggggacaagagcaaccccatcttcgacacccagaagtacggcgggtacaacaacctgaacaacgcctacttcatgctggtcgagtccaaggacaagaagggcaagaccatcaagaccatcgaggccgtgcccatcctgatcctgatcaagaacatgggcaagcccaacctgaacgagaacatcctgaagtacatctccgagacccgggggctgaacgacgccaagatcctgatcgacaagatcaacttccagagcaccttcctgatcggccgcggccggtacgtgctgggcggcaagagcgacaacgtgatcctgctgcacaacgccaaccagatgttcttcgacgacgagtgcaagaagtacatcaaggccatcagcaagtacttccggctgaaggccgacaagatcgagtcctccctggagcaggacgacgagaagatcgccctgtcccccgccagcaagaaggagaacaaggagatctacctgaccaaggaggacaacctgaagctgtacgagaagttcatcgagaagctgagctgcagcacctacgagggcatgcagctggccaccgtgctgctgcccaagctgaaggagaagaaggagctcttcatctccctcagcgtgcaggaccaggtgcaggtgctgcacgagatcaccaagcggtgctcctgcggcgccggcttcgccgacctgtccaagctgaaggacgggacctccgtggggaagatctccatcaacaagaacatcaccgacaagaacatcatcctgatcaagaacagcgtgtccggcctgttcgagcagcggatcaagctgtga

SEQ ID NO: 188 - DNA, 3996 bp, synthetic construct
  source 1..3996: mol_type = other DNA
atgaagaagtacaacatcggcctggacatcggcaccacctccgtggggtgggccgtggtggagaaggagaacttcaaggtcatgaagaagggccgcaagaagatgtggggcgtgcggctgttcgacgaggccacctccgccgccgagcggcgggggtaccgcaacacccggcgccggtacgaccggcgccggaagcggatccagctcctgcagaaggagttccagaaggagatgaacctggtggaccccaacttctaccagaagctgaaggaggccttcttccacgagtgcgacatcttcaacaagaccaccatcatctcccaggaggagaaggagcagatgaagacctactacaagctgtaccccaccatctaccacctgcggaacgagctggtgcacaccaccgagaagatcgacatccggctggtgtacctggccatccaccacatcgtgaagtaccggggcaacttcctgtacgagggggccaagttcaacaccagccagctgcagctcaacgagaagatcaacgagctgttccacgtgatcgacatcaccaacgggaccatcgagcaccactccgagatgatcgagctcctggacagcctgaagctggaggaggccctgctgctggagaacaagaacgagcagcggatctacatcaaggaggccctgcagaactacttcagcaagaacttcatctccgagttcaccaagatgatcctgggcgacaacttcagcgtggccaagctgttcgacgtggagctggaccccgacatcaagctgaacttcaaggggtccgactacgacgagaagttcgcccagctggagaaggagatcggcaaccagatcgacatcctgaaggagatgaagtccctgtacgacatcctgttcctgaagaagctgctggagggggaggacgaggggaacatctccgccatcatggtgaagcggtaccagacccacaagcaggacctgaacctgctgaagtccgtgctgaagcagaagaaggagacctacaagcaggtcttcaagagcaaccagaagctgtgcctgtacgagcagtactgccacaaccacatcacctacgacgagttcaccaagaagatcctgaacttcctggagaaggaggacatctccgacaactccatcctgctgaagaagcggatcgagaccgggaagttcctgcccaggatcaccaacatcgagaacgggaagttcccgtaccagctgaactacagcgagctgatctccatcatcgagaaccaggggatctactaccccttcctgaaggagaaggagaacaacacctacaagctgatccagctgctgcagttcaggatcccctactacgtggggcccctgaacaacaccaccaacaccctgaagaagaactccaacgcctgggccatcaagaaggagaacgtggcctgcatcaccccctacaacttcaagaaggtgatggacctggacgccagcgccgaggagttcatcctgcggatgatcggcaagtgcacctacctgctgaaggagaaggccctgcccgaggcctccatcctgtacagcaagttcaaggtgctgaacgagctgaagcagatccgcatcaacgggcggaagctggagctggagatccagcagaagatctacaaggacttcttcctgaagaacagcgggaacctgaccgacaaccggttcaagaccttcctgtaccagatgcccgagatgcggatgtacgacgacctgaccatcaccgggtacagcgccgacatgaagttcgccaacacgatgcagtcctacatcgacttcttcggcgagaacggcatcttcgagggcacctcctacgacgagaaggacgccgagcagctgatctcctggatcaccatcttcgaggaccaggagatcctgaagcggaagatcgaggcccactacagcctgaacgagaccaagatcaactgcctgctgaagaagaagtacaagggctggtccaacctgtccaagcggctgctgatcaccaagtactaccagaacagcaacgccatcaccaagcagtccatcctggacctgatggagaccaccgaggagaacttcatgcagatcctgtacaaccggaagtacaagttccaggacatgatcgcccagatcaacgggaacgagatgtcccagaagctgaactacgaggtggtcagcgagctggccacctcccccgccgtgaagaaggggatctaccaggccctgctgctggtggaggagatcatctccatcatgggctacgagcccaaccagatcaccatcgagatggcccggggcgacgagaagaaggagcggaagtccgaccgcaagaagtggatcgagaacctgttcaccaagtgcaagcagcagatcaccaactacaaccagctcaagaaggagctggaccggttcgagtccatcgactcccagaagctgttcctgtacttcatccaggagggcaagtccctgtactccgggacccctctggacatcgagaagctgaacagctacgagatcgaccacatcatcccccggaccctgtggaaggacgacagcatcgacaacaaggccctggtgctgaagaaggagaaccaggagaaggccgccgccttcgtgctgccgtccaagttccgcaacgacgccatgcggaagtggtgggaccacctgaagctgaacgggctgatcagctccaagaagtaccacaacctgtgccggtccaagtacaccatcgaggacatcgaggggttcatcaaccggcagctggtggagacccgccagatcaccaagaacgtggccaacatcatccagaagtaccaccccgactccaagctgatctacatccccgccagcctcagccacaactaccgggagaagttcgagctgttcaagttccgggagatcaacaacttccaccacgcccacgacgcctacctggccgccgtgctgggggagtacaaggtctcctacctgaaggaggccatggactacgagcagctgaaggagctgaccacccagtggatgaaccacaagaactacaaggagctgaactacggctacgtgatcaactccctggacaacaagttcccccggtacgacctgaacggggagatcgtgttccaccccatcgacttcaaccagacggtgaagaacaccctgtaccagaacgacgtgatcatctccaagaagaccgagatgaagacgggcaagttctacaaggagaccatccactccaagcgggccaaggggaacaagctgtccctgaagaaggggctggaccccaagctgtacgggggctaccaggacatcgaggtggcctacaccatcctggtgtactaccagaaccagtacaagctggtgggcatccccatcctgatctacaagcaggcccagaagaacaccgacatcatcatggagtacgtgaaggagcacctgaagctgaaggagaacgactcctgcaccctgatcaaggacaagatcttcttcaacaccctgttcctgtacaagggccagtacgtgtacctgcgggggtacagcaccgagtccaaggggtgcgagatcgccaacgccaccgagctgaagatcccccgcaagaagatggagcagtggaagtacaccctgaactacgtgctgaacgacaagaaggtgcccaacaacctggaggagctgctgaccgaggacaagatcgaggcccagatgaacgagatcatccagtggctcctgtccaagcaggagtactaccccctgtacaccagcgccatcgagaagatcaagaccgtgttcaacgagatcaacctgagcttcgaggagcagaagcgggtgatcaaggagctgttcatcctgtacggcacctcccggaacgccaacctgagcttcatcgagaacggcggcctgtccgaccggatcggccgcctgagcgggaagaacgtgaaccacggcatcatcttctaccgctccatcagcggcctgaaggagcggtactacgagttctga

SEQ ID NO: 189 - DNA, 3270 bp, synthetic construct
  source 1..3270: mol_type = other DNA
atgaagcagctggtgctgggcctggacatcgggatcaccagcgtgggctacggcatcatcgacatcgagaacaacgagatcgtggactgcggcgtgcggctgttcaaggagggcagcgccgccgagaacgagacccgccgcgagaagcgggggtctcggcggctgaagtcccgcaaggtgaaccggatccaggacatggagaacctgctgaaggagctgggcatctacgagaactgcaacctgatccacaacaacccctacgacctgcggatcaaggggctcagcgagaagctgaccaacaaggagctgacccgggtgtgcctgcactacgccaagcgccggggcagctccctggacatggtcgaggacgacgagaccaaggccaaggagctgggcgagaccaagaagatcctgcaggagaacgacatcctgctgaagcaggggtactacgtgtgccaggtgcagaagatgaacgagcagaagtacgggaagatccacggcaactacaacaacttccgcaccagcgactacctgaaggaggccaagcagctgctgagcatccagggcctgaaggaggagaacatcgagaagatcctgaacatcatccagcgcaagcggcagtactacgaggggcccggctccctgaagagccccaccatctacggccgcttcatcgaggaggacggccgcatcatcaagatcgacctgatcgagaagatgcgggggcactgcagcatctaccccgaggagctgcgggcccccaagatgagctacagcgccgagctgttcaacttcctgaacgatctgaacaacctgaagatcgacgaggagaagatcacccccgagcagaagcaggagatcatctccatcatccagaccaagaagaacatcacgcccctgcagctgagcaagttcctgggcgtggagatcgagaagatctccggcttccgcatcgacaagaaggacaagcccatcctgaccgagttcaagggcttcaagatcatcgccaaggtcctggagaagaacaacgagaaggagctggtgaaggacgtgaagttcgtggactccatcagcgagatcctgacccgcaccaaggacatccaggagcggatcgagagcatcgagaagctcaacgacaacctgtccaaggagtgcatctactccctggccaacatcaccgggatccggggctaccacagcctgagcctgaaggccatctacgagatgaacgaggagctcctgaacaccgagatgaaccagatgcagatcctgcagtccagcaagaagctggagcagaagatcaaccagaaggggaagaagaacatccaggaggacaacaccgccatcctgtcccccgtggccaagcgggccatccgggaggccatcaaggtggtgaacgccgcccggaagcgctacggggagttcgactccatcgtggtggagaccacccgggacaagaacagcaaggagcagaagaagcgcatcgacgacgcccagaagtacttcaagaagcggcgcgaggaggtggacgaggtggtgaacgggcggcccctgaacgccaagacccgggagaagatccggctctacatggaccaggacggcaagtgcgcctactccctggagcccatcgacctgaacctgatcatgaacgaccccaccgcctacgagatcgaccacatcatccccatcagcatctccctggacgacagcttcaacaacaaggtgctggtgcgccggaaggccaaccaggacaaggggaacgagaccccctacaacgccatcaagcagggcaagatcaagaacaagaacctgaagtccgtgagcatccaggagtaccaggcctacgtgctgaacctgcgcaaggagaacaagatctccaacaagaagaaggagtacctgctgtcccagaaggactacaccaagctggacgtgcggaaggagttcgtgaaccggaacctgatcgacacgtcctacgccaaccgggtggtgttcaacaccctggaggactacttcaagcagaacgagatcgacaccaaggtgcacaccatccggggcgccgccaccagcgccttccgcaagaaggtgaacctgcagaaggtgcgggaggaggaccactcccaccacgccatcgacgccctgatcgtggccagcatcaagaagctgaacctgctgaacaagctgctggacgtgaagaacatcaaggacgtgtacgacgacgagaccggcgagtacctgcccatggacgacaactcctacttcgaccccaagtacatgaacttcatcaaccagctgaaggacgtgaagatcaccaagttcagccacaagatcgacaccaagcccaaccggcagatcgccgacgacacgatctacagcacccggatcatcgagggcgaggagaagctgatcaagaagtacggggacatctacgaccccaagttcgacaagctgaccaacgacatcctgaacgagagctaccagaacaagtacctgatggccatccacgacagcaagaccttcgacaagttcatcaacatcgtgcaggaccactacaacacctacaaggacgacagcaagatctacaccctggacaaggggaagatcaagctgaagggggacaaccccctgttcctgtacaagaacgagcacgggttcgtgaccaagtacagcaagaagaacaacgggcccgccatcacccagatgaagtacgtggactgcaccctgggcaaccggatcgacatcaccagcaactacaagatcaaggacgacaagaaggtcgtgctgcagcagatcagcccctaccggaccgacttctacctggacgaggacggccactaccagttcgtcaccgtccggtacagcaacatcaagtggaaggccacccagcagagctacatcatcgacaaggagtggtacaagaacgccaagaagcagaagggcatccaggagaacgccaagttctgcttctccatgcaccacgacgagctgatcggcttcatcaaggaggacggcgagaagctgatctacaacgacgagcacaacctgatcaacatcatgaaggagcacaacggcaaggactacgagatcctgaagttcaccgccaccaacaacgagggcaagaacatcgtcgaggtgaagccgatctacaagtacaccagcgaccggatcaagcccctgatcaacaagaagatcatcaagctggccaagttcgccaccgaccccctgggcaacctgtacgaggtgaaggacagcaagctgaagctggagctgtga

SEQ ID NO: 190 - DNA, 4068 bp, synthetic construct
  source 1..4068: mol_type = other DNA
atggaggagaagaagaagtacaacatcgggctggacatcggcaccagctccgtgggctgggccgtggtcgagtccggcacccagaagatcatcaagaaggggaccaagaagtcccgcaagtccctgtggggcgtgcggatgttcgaggaggcctccaccgccgccgagcggcggctgtaccgctcctcccggcgccggtacgaccggcgccggaaccggatcaagcggctgcagaacgagttcgagtccgagatctccaaggtggacaaggacttcttccagaagctgcgggagtccaagtaccacaagaacgacgagcagaacaagaagatcgtgctgtcggactacgagaagaacaagatcaaggagtacaacgagaactacaagaccatctaccacctccgcagccgcctgatccacgactccagccaggaggacatccggctggtgtacctggccatccaccacatcatcaagtaccgcgggaacttcctgtacgacaccaaggagttcaacgtgaaccacctgaacctggtgaacagcctgaagatctgcttcgcctccctgagcgacttcttctccaacctgaacttcagcgagaactacgaggaggtgatcgacttcgagaagctggccaacatcctgatgaagtccaccaagaacgacatcaggatcagcatcaagcagctgctggagggcatctgcgagaacaagaagttctccaccgagttcgggaagctggtggtggggaacaagttctccctgaagaacctgttcctgctggaggagctggagaccgacatgaccatcagcttcaacggcaccgactacgaggacaagtacaacgagctggaggagctcctgggggacaagatcgaggtgctgaacgccctcaaggagctgtacgacatcatcttcctgaagtccctgttcaaggacagcgacaccctgctgctgtccgacctgatggtgaagcggtacaacctccacaaggaggacctccgcttcctgaagcagatgctgcggaacacccgggacctgtacaaccaggtgttccgcacctccaaggagacctgcctgtacgagctgtacatccacaaccagatgacctacgaggagttcgtgaacaagctgcagaagatcatgagcaaggtgttcatcctgaacatcgacgagcagatggagcagaagtacaagaaggaggtgcagccccgcatcgagaacgggggcttcctgcccaagatcaccgactgcgacaacgggaagtacccctaccagctccacaaggaggagctgatcaagatcatcgagaaccaggggaagtactaccccttcctcctggacaaggtgaacggggagtacaagctgctcaagctgctcgagttcaacatcccctactacgtggggcccctggtgaccgaggacaagtcccccttcgcctggatggagcggaagaaggacggggtgaagatcaccccgtacaacttcgacgaggtggtggacaaggaggccaccgccgagaagttcatcaagcggatgatcagccactgcacctacctgctgaacgagtacgccctgcccaaccactccatcctgtacagcaagttcaaggtgatgaacgagctgaagcagatcaagatcaacaaccagaagctggacaaccacctgacccagaagatcatcaccgagctgttcatgaagaccaacgggtccatcaccgacaagcggttcaaggagtacctctacaccctgaacgagttcgacatgttcatgggcgacatcgagatcaaggggtactccgccgaccacaagttcgccaacaacatgcagagctacgtggacttcttcggcgagaacgggatcttcaactccacctcctacaccgtggaggacgccgagaagatcatcgagtggatcaccatcttcaaggagaaggacatcctggagaagaagatccgggacgcctaccccgacctgctggacaaccaggtgaagatggccctgagccgcaagtacagcggctgggggcggctgagccgcaagctgctgaccggcctgttcatcaaggacaagaagtccgacgtgcccaagaacatcatggacttcatgcaggagaccaacgagaacttcatgcagatcatcaacaacgagcactacaagttccagaagctgatcgacgagaacaacctgatcaaggagaccaagaagatcaactacgacctggtgaaggacctggtcaccagcccctccaccaagaaggccatctaccagagcctgaagatcatcgaggagctggtgaactacatgggctacgagcccgagaacatcatgatcgagatggcccggggcgggggcaagaaggagcggaccatcgaccgcaagaagtacatcgagaccctgtacaagaacctggagagcaacaaggccaccacctacttcaccaacttcgaggtgaccaaggaggagctgaagaagatcgagaagatcgacagccagaagctcttcctgtacttcatccaggaggggaagtgcctgtactccggggagcccatcaacatcgaggacctctccaactgcgagatcgaccacatcctgccccggaccctgatcaaggacgacagcatcgacaacaaggccctggtgtaccgcaactgcaaccagaagaaggccgcctccttcgtgctgcccccggagtaccggaacaaccaccgcaagaagtggtggaaccacctgaaggagaacggcctgatgaccgagaagaagttctaccggctgacccgggagttctacaccgacgaggacatccagaacttcatcaaccggcagctggtggagacccggcagatcaccaagcacgtggccaacatcatcaagtccctgtacaagaagaccaaggtgatctacctgaaggccgagctgtcccaccactaccgggagaagttcgccctgttcaagttccgggagatcaacgactaccaccacgcccacgacgcctacctggccgccgtgctgggcgagtacaaggagaagtacctgaagcggaacgtgaacttcgagatgatcaaggagatgaactaccagctgcggatgtccggcgaccggaaccagctgaagtacgggtacttcatcaactgcctggacaagaacgtcaacgacatcgtgatcgagatgtgcaagtccatgatcgacgactccaccggcgagctgctgttcgacgtggtggagttcaacaagcggatcgaggacgccctgtaccggaacgacatcctggtgaccaggaagaccgagatccgcaacggcaagttcttcaaggagaccatctaccccaagaaggtggggcggatcaagatcaaggagaacatgcccacccacctgtacggcggctacagcaacatgcagaccgcctacctggtgctgatcaagtacggcaagaaggtgaagctgatcgggatccccgtggacatccacctgaagtcccggaaggactccaccatcaagttcaacttcatcaaggagcacctggacgtggacaccttccagatcctgaaggaccacatcccctacgagtccttcatcgactacaaggggcagaaggtctacatcaagggctacagcgtggccaacaagaactgcgagctgtgcaacgcccggcagctgaagatcccccgggagaagatgaagaactggcgctacgtgctgaacaaggtgctcaacaaggtggacatcccctgggagaacgacgaccccatcctgtccgacgacgagatcatcaaggtgatgttcgagatcatcatgtacctgtaccagcagaaggagaactaccccctgttcatcaacgagatcaaccggatcgaggagaagatcggcctggagaacctcgactacgaggccctggccaagatcatctcccagctgttcaccatctaccactgcgacagcatccacggcaacctgaaggagttcggcctgaaggaccggatcgggcggctgtgcggcaagaacatcgagtccggggccatcatcagccggtccatcaccggcatccgggaggaccagtacgagttctga

SEQ ID NO: 191 - DNA, 4266 bp, synthetic construct
  source 1..4266: mol_type = other DNA
atggacaagaagccgccctactacatcgggctggactgcggcaccaactccgtggggtgggccgtgtccgacaagaactaccacctgctgaaggggacccaccacatcaagaccgagaaggggaccaagaccaagaagcagaccctgtggggcttccggctgttcgaggaggccgagaccgccgccgagcggcggatccaccggtccgcccggcggcgggccgagcgcgccaagaaccgcctgaagctcctgcggatgctgtttcacgacgagatcgtgcaggtggaccccgagttctaccagcggctgaaggagtccttctacctgctggacgacaagaagctgcagaagaacagcaagaacacgctgttcaacgacagcaacctgaccgacaaggacttccacaagaagtaccccaccatctggcacctgcggcaggccatcatcaacgccaaggatgacgaggccttcgacatccggctgtacttcctggccatccagcacatcctgaagcaccggggccacttcctgatggagggggagatcaactccgacggggacgtggacttcgagtccatcttcgagaacttccggtgcgaggccgagcgggtcggctacaacatcgccgacgtgccggccgaggtgaaggagctgctgatgcagaagatgtccaagacggacaagaagaagtccctcaaggacatcctgtacatcgagggggacgagctcgacgacgacgtccccaagggccagctggagctggccgggctgctggtcggctccaaggtggacctgaagaagatcttctccatcaacgacgacgagaagttcccctactccttcagcgagggcgccttcgaggacaagctgcccgacatcgagatgaccgtgggcagcgagaacctcgacctgatcttcgccgccaagaagatctacgactacgtgaccctggacaacctgctggccggcaacaagctgatcagcgacgccatggtggccaactacaaccagcacagcaacgacctgaagaagctgaagcaggtgttccggccccaccgggaggtctacgacaagctgttcaagaccaagctgtacaacgagaagttccccagctacgacgcctacatcagcaaggcctacaccgaggacaagtccgggcggaagtcctcgaagaacatcgggcaggaggacttcaacaagcacctgcacaagctgctggaggagatcaagaccaagaccaagcccgagctggactccctggtggacgagctgctggaccggaccgacaccagcgagaagtccgtgtccccgctgctgctgcccaagcagcgggggcaggccaagggcaccatcccccagcagctgcacggcaaggagctgaagtacatcctgcagaagctgcagaaggactacccgtccttcgccgaggtgacccccggcgaggacgagtcctgcaacaccaaggccaagaagatcatcaagatccacgagttccggatcccctactactgcggccccatcgtgaagcggaagttcgacgatgacgggaagcaggtggccaacggcaagagccagttctcctgggccgacgaggagatcgccgagctggtgtacccctggaacttcgacaagctgatcaagaaggagcagcgggccaacaacttcatccgccggatgaccaacgagtgcacccacctggtgggcgaggacgtgctgcccaagtgctccctgatctaccagaagtacatgatcctgaacgagctgaacaacctgaagatcaacggctaccggatcgacaaccagctcaagcagcagatcttcgagcgggggtacaagaacaacgagatcaagggcaacatcaccctgaagaagctggagaagtggtgcaaggacaacgccctgatctccatcaacgacgagatgagcggcaccagcgaggtgaagaccctgcccaagtaccagacctaccaggacttctcccggatcctgggcaccgacttcgcccacaagtacagcgccaacaagctggagaaggtggtggagtccatcaccgtcctgggggacgagaagtccatgctgaagcagtccatccaggagatcctgaactgcgacgccaagacggccaactccctgtccaagctgagctacaaggactgggggcggatgtccgccaagttcctgaacgggatcaccgtgaacgaccggaccatcctggactacctgtgggaggacaacaagaacctgatggagctgctggggcaggaggtgggcttcggcaagatcgtggaggagtacaacaagtccaagcggcccgtcaccaaccggatcacctaccacgacgtggagtccctgtactgcagcccagccgtgaagcggtccgtgtggcagaccatccggatcgtggacgagctggtgaagaacctgcagtacgcccccgagaagatcttcctggaggtgacccggggcgaggacaagaacgccaagggcaagtacaccctggcccggcggaaggacctggagaccaagctgaaggccgtgaagaccgacgacgcccgggccatcctgaaggagctggacggctacgaggaccgggacctccagagcaagaagctgttcctgtacttcagccagatggggaagtgcgcctactccggcgagcccatcagcctggaggagctgaacaacagccagctgtacgacatcgaccacatctacccccggtccaagaccaaggacgacagcatcacccggaacctggtgctggtgaaggccaacctgaaccgggagaagaccaacaactaccccatcagcgacaccatccggaacaagatgcacggcatctggtccgtgtggtaccaccagggcctgatcaccaaggagaagtacgagcggctgacccgggccaccccgctgaccaacgacgagctgggcagcttcatcgcccggcagctggtggagaccagccagtccgtgaaggccatccgggacctgctgaagcaggcctaccccaagaccaagatcgtgatggtgaaggccggccaggtgtccaacttccggcacctgatgtcccgggacaagaaggaccgggacggcaacatctacgagcccggcaagcccgagttcatcaaggtgcgggagatcaacgacctgcaccacgccaaggacgcctacctgaacatcgtggtgggcaacgtgatgaacgagaccttcacggacaaccccaacgagtggatcaagcggcgggccgggaaggagtactccatcaaccccgagcgcatcttccgggccagcaagacctaccggaaggccaacggggaggagacctcctaccccgaggtcaacggctggaacttcgccgagtccatccaggccgtgtccaacacgatgcggcggaacgacgtgatctggacccggatgaactacatcgagagcggggagatcagcgacctgcagctggtggggaagtccaacaaggccgacggcctgctgcggatcaagcagcaggagcggctggaccccaagaagtacggcggctacaactccctgaagggcgcccacttcgccctgatcgagtgcaaggacaagaaggggaacctgcagcggtgcatcgtgcagatccccatcatcgccaagaacaacatcgagaactacatcgccgagaactacaccgacgcccaggtgatcctgcccatcatcaagtacaagtccctgctgaaggccgacggcctgctgctgaccatcagcaacaaggactccgacctgaagaacgggtaccagcacgccgtgcaggccaagttccagcagagcatcagcccctacctgaagaccatctgctccatctgcgccaaggacaagctggcgcggaacaactaccagatctccaccgaggacaacgtgaacgtggagcacaacctccagctgttcgacgagttctgcgacaagatgaagatctacagcgggtaccccgagctggccggcggcatcgagaagatcatgctgtcccggaccaccttcagcgagctggacctgaagcagcagtgcctgaccctgggccagatgatgttcatcttcgcctgcaaggcccagaacgccaagctgaacaccatcggctgcggcgacagcgtggggcggatccggatcagcaacaacaagctgttctcctacaacaacctgcacctgatcaaccagagccccaccgggctgtacgaggaggtgatcgacctgaagaccgtgcggcccaaggtgaacaagcaggaccgggagtga

SEQ ID NO: 192 - DNA, 4140 bp, synthetic construct
  source 1..4140: mol_type = other DNA
atggtgctgcggcagctgcacaacacgatgtaccggcggtactgccagctgaacagctccgagaaggtgaagaagtacaacatcgggctggacatcggcaccaccaccgtcggctgggccgtggtggaggagaacacccagaaggtgatcaagaagggcgaggcccgcaaggccctgtggggcgtgtccctgttcgaggaggccaagaccgccgagaagacccgcagcttccgcggcacccgccggcggtacgaccgccggcgggagcggatcaacctgctccagtccgagttcctggaggagatcaacaaggtggaccagaacttcttccagaagctgaaggagtccaagtaccaggaggacgacaccgtgaacaagtccatcatcctgagcgccgccgagaagaagaaggccaaggagtacaacaacaagtacaagaccatcttccacctgcggagccggctgatccacgactcctccaaggaggacatccggctggtgtacctggccatccaccacatgatcaagtaccggggcaacttcctgtacaacgtggagaacctgaacaccaacaagctggacctgaccgacaggctgaagagcgccttcgacagcctgatggacctggccagcaacctgaacatcatggagaactacgagaaggtggtctccatcgaggagatcaccaaggccatcatgaaccccagcaagaacgacatcaaggtgaaggtgaaggagctgctggtgaacctgtccgacaacaagaacttcggcagcgagttcgggaagctggtggtcgggaacaagttctccctgaagaagctgttcatgctggaggagctggagaaggacatctccatctccttcgacggcaccgacttcgaggacaagtacgacgagctggagaacaccctgggcgacgccatcgaggtgatctccgtgctcaaggagctgtacgacaccatcttcctgaagaagctgttcaagggcaaggccaccagcagcctgagcgacctgatggtggagcggtacaacgtgcacaaggaggacctgcagttcctgaagcagctgttcgacaaggaccggaagctgtacaaccagctgttccggaccaaggagaaggcctgcatctacgagcagtacatccacaaccagctgacctacgaggacttcatcaaggggctgaagcggctgctggagaacatctccgacatcagcatcaacgacgacctgcgggacaagtacacccgcgagatccagccccggatggacaacggggagttcctgccccggatcaccgacctggagaacgggaagtacccctaccagctgaacaaggacgagctggagaagatcatcgagaaccaggggaagtactaccccttcctgaaggacaagatcaacgacgagtacaagatcgtgaagctgctgaagttccggatcccctactacgtcggccccctggtgtcctccgacaagagccggttcgcctggatggagcggaagatcgacaaggtgaagatcaccccgtacaacttcgacgaggtgatcgacaaggagaccaccgccgagaagttcatcaagcggatggtctcccactgcacctacctgctgaacgagttcgccctgcccaaccactccatcctgtactccaagtacaaggtgatgaacgagctgaagcagatccggatcaacggcaccaagctgtccgacctgaacaccaagctccccaacaagatcatggaggagctgttcatgaagaccaacggctccatcaccgacaagaagttcaaggagtacctgtactactccaacgagctgacgatgtacgagaacgacctgatcatcaccggctacagcgccgacggcaagttcgccaacaacatgcagtcctacgtggacttcttcggcaagaaggggatcttcgagaacaccagctacaacgagaacgacgccgacgagatcatcgagtggatcaccatcttcgaggaccgggacatcctggagaagaaggtgcggaagaactacagcctgctgtccgacacccaggtgaagaagatcctgagccggaagtactccggctgggggtccctcagcaagaagctgctgaccgagctgaccatcaaggacaagaagtccaacatcagcaagaacatcatgaccctgatggaggagaccgacgagaacttcatgcagatcatcaacaacgacgagtacgacttccagaagctgatcaaggagaacaacgtgctcaaggacaccaacaagatcaactacgacctggtgaaggacctggccaccagccccgccaccaagaagggcatctaccaggccctgaaggtgatcgaggagatcatcgactacatcgggtacgagcccgagaacatcatgatcgagatggcccggggcgaggacaagaagaaggccaggaaggacgacaagaagaagtacctgcagaagctgtaccagacgatgaaggaggagaaccggatcgacgacttcgacaactacgacgccatgtcgaagaagctgaacaaggtggacaacatcgacagcgagaagctgttcctgtacttcatccaggaggggaagtgcctgtacagcggggagccgctgaacatcgaggacctgaactccgccgagtacgaggtggaccacatcctcccccggaccctgatcaaggacgacagcatcgacaacaaggccctggtgtaccggaagtacaaccagaagaaggccgccagcttcgtgctgccgtccgagtaccggaccgggtacatgaagaagtggtggagccacctgaagaagaacgggctgatctccgccaagaagttcgaccggctgatccgggacagctacaaggacgaggacatccaggggttcatcaaccggcagctggtggagacccggcagatcaccaagcacgtggccaacatcatcagcaacttctacaagaagaccaacgtgatctacctgaaggccaacctgagccacaactaccgggagcggtacgagctgttcaagttccgggagatcaacgactaccaccacgcccacgacgcctacctggccgccgtgctgggggagtacaaggagaagttcatgaagaaggacatcaacttcgtgatggtcaaggagatgaacgaccggctgcggtccctgggcaactacaagcagctgcggtacggcttcgtgatcaactccctggacgagcaggtgtccgacatcgtgaccgagatcagcaagagcatgatcaacaaggacaccggcgaggtgctgttcgacgccaagcgcttcaacaagcaggtggagaagaccctctaccgcaacgacatcctggtgtcccggaagaccgagatccgcaccgggaagctgtacaaggagaccatctaccccaagggcatcggcaccatccccgtgaaggagaacatgcccaccaacctgtacgggggctactccaacgtggagaccagctacctggtgctggtgcgctacgggaagaagaagaagctgatcggcatccccctggagatcgccctgaagtccaagaaggacatcaacaagaagtacagcttcatcaaggagcagctgaacgacatcgacgacatcgaggtgatcaaggacttcatcccctacgagaccctgatcaactacaagggccagaaggtccacatcaagggctacagcatctcccacaagaactgcgaggtgtccaacgccctgcagctgaagctgcccagcaacaaggccaaggagtggaagtacgtgctgaacaaggtgctgaacaagaagaacatccccatcgtgaacgacatccccatcgtgagcgatgagctgctcaacgagacgatgaagaagatcatcctctacctgtacgagcagaagaagaactaccccctgttcgagtccgagatcaccaagatcgaggagaagatcaacttcaacgagatgaacatcgacgagctggagaagatcatcgtgcagctgttcaccatctaccactgcaacagcgtgaacggcaacctgaaggacttcgggctgggcgaccggatcggccggctgttcagcaagaccatcgactccggcatcatcatcagcacctccatcaccggcatcaaggagagcaagtacgagttctga

SEQ ID NO: 193 - DNA, 4122 bp, synthetic construct
  source 1..4122: mol_type = other DNA
atgatgtactacggcggcatcgacctgggcaccagctccgtgggctgggccctgaccgacgagcactaccgcctgatccacaagaagggcaaggacctgtggggcgtgcggctgttcgacgaggccgagtccgccaaggagcggcggagctcccgggtgagccgccggcggcgcgcccgggagaccgcccggatcggcatgctgcgggagtacttcagcgccgagatcgagcagaccgatcccggcttctaccagcggctggaggagtccaagtaccaccgcgaggacaagcggaccaaggagaagtacgccatcttcgccgacggcgacttcaccgaccgggagtactacaagacctaccccaccatcttccacctgcggaaggagctgctggagagcaccgagtggcacgacgtgcggctggtgtacctggccgtgctgaacctgttcaagcggcgcggccacttcctgaacgagtacctcggggagaccgacaaggagggcggcatggacgagctgtaccgcaccttctgcgactccctccccgaggagctcgagctgaagttccccgagctgtgcgccgccgccgccgacttcgagcagatcctgggcaaccgggatctgtcccggagcgggcgggccgaggagctcctggccttcctgggcatgaccaagaaggagaacaagaaggagttcgagctggtgaagatgttctgcggcctgagcggcaagctggccgtcatcttcggcaaggagagcctcggcagcgagttcgagaagaaggagctgtccttccggagctccgcctacgaggagacgatgaccgagatcggcgacatcctcccccaggagtacctggacgtgatcgaggccgccaagaacatccacgacaagggcctcctgggggacatcctcaagggcgagacctacctgagcatcgcccgggtggccagctacaagaagcacaaggccgacctgaccctgctgaagaagaccctgaagaagtactgcaagcgggaggagtacgacgcctacttcagggtcatggccgacgacaactacagcgggtacgtcgggtccgtgaactccgagaaggagcgctccggcaaggacggcctgcagcggggcaagttccggcggaaccggaacgccaagaaggagaactacaagaacttctggaagaagaccaaggagctcctgaaccagatgcccgaggaggacgaggacgtccggtatctgaagcaggagctcgagaaggagaccttcctgcccaagcagctgacctccgagaacggggtcatccccaaccaggtgcacctgagcgagctcaagaagatcctgagcaacgccgaggggtacctgcccttcctgctggagaaggacgagagcgggctgaccgtgtccgagcggatcgtgcgcctgttccagttccagatcccctactacatcgggcccctgtacatccgggagggcgaggaggggcggaagtgggtgaagcggaaggagggcggcaaggtgctgccctggaacatggaggagaaggtcgacctggccaagacccgggaggccttcatcaccggcatggtgcgccggtgcacctacatggagggcaagtacgtgctgcccaagaacgccctgctgtacgaggccttcatggccctgaacgagctgaacaacgtgcggatccacggggagaagctgcccgtggccctgaagcagcagatctaccgcgagctgttcatgaccgggaagcgcatcacccacaagcgcttctgggagtacctggtggccgacggccagctgtccaaggaggacaccgatgccatcagcggcatcgacggggacttcaagcagtccctggtgtcctacgggcggttctacagcgtgttcggggaggagctgaagaaccgcgacatctgggacatggccgagcagatcatcttctggggcaccgtgtacagcaacgacaagaagctgatgaaggagctgatcaccgagaccttcggcgagaaggcccagaagaccctgctcagcgaggcccagatgaagcggatctccggctacaagtggaaggactggggccggctgtccgccgccttcctgaccctgcgggggtgcagcaaggaccccaacgagggcggggtgatctacagcctgatcgaggccctgtgggagaccgactgcaacctgatggagctgctgagcgaccggttcaccttcatggacaacctggaggagcggaccaagaagaacgagaagctcctgggggagttctcctaccaggacctggaggactcctacctgtccgcccccgtgaagcggatgacctggcagaccatcctgatcctgaaggagctgtacggggtgatgggcgagcccccgaagaagctgttcctggagatgccccgggagcacggcgagaaggggaagcggaccgtcagccgcaagaagaagctggaggccctgtacaagggctgcaaggaggacggccgcaactgggagcaggagatcaagggcctgaccgaggaccagctccgctcccggaagctgtacctgtactacacccagatggggaagtgcatgtacaccggccgccccatcgacctggagaccctcctgcgggagaactccaggtacgacatcgaccacatctacccccggcacttcatcaaggacgactccatcgagaacaacctggtgctggtggagaaggagtcgaacggccacaagaaggaccactaccccatcgaggccagcatccggcaggagcggatgggccactggaagttcctgaaggagaagggcctgatcaccgaggagaagtacaagcggctgacccgctcctgggagttcaccgaggaggagctggccgccttcatcaaccggcagatcgtggagaccggccaggccgccaagtacaccgcccagctgctgaagcggctgctgcccgagaccgagatcgtgtacgtgaaggccggcaacgtgtccgacttccggaacaagcgggacctgctgaagtcccgcgtggtgaacgacttccaccacgcccacgacgcctacctgaacatcgtcgtggggaacacctacgacaccaagttcaccaagagccccatccacttcatctggaactacaagcgggaccccgagaagtaccggtaccacatggaccggatgttcgacttcgacgtcatccgggacggggtgaccgcctggaaggccgggaaggacggcaccatcgtgaccgtggagaagatgatgaagaagaacaccccgctgctgaccaagcgggcctacgaggcccacggcggcatcgccgagcagaccatctactccgccaaggaggccaaggcggagagctacatccccgtgaagagcggggatgagcggctcggcgatgtgaccaagtacggcggcttcagctccgtggccggcgcctactacttcctggccgagcacggcaaggagggcaagcgcaagcggaccctggagcagatgcccatctacctgaaggagcgcctcgagcaggacgaggaggccctgaaggagtactgcatcaagaagctgggcctggtgaaccccgacatccggatcaagaagatccccttccggagcttcgtgaagcggaacgggtactacatgtacctgggcggcaagaccaacacccagatctggatcgagaacggggtgagcctgtgcctgagccgccagtgggtgaactacatcaagcggatggagaacttcaactccaacgagaaggaggaggacaaccgcgccgacaagaagaaggagatcaccaagcagcggaacgaggagctgtaccaggagctcctcaccaagcaccgggacaccatctacgccaagaagcccaacccggtgtacagcaagctgtccgccaagcagaacgacttcaaggagctgaccctgcgggagcaggtgcgggtcctgctggagctgctgaaggccacccagtgcgtcaacctgggcgtgaaggccgccgagatcggcctgaaggtcagccccctgaacatcgggaagggcatcggcaacgaggaggagttcctgctgatctaccagtccgtgaccgggatctacacccggaccatcgacctgaagaccgtgtga

SEQ ID NO: 194 - DNA, 4107 bp, synthetic construct
  source 1..4107: mol_type = other DNA
atggacaagttctacctgggcctggacatcggcaccaacagcgtgggcatcgcctgcaccgacgagaactacaacctgctgcgggccaagggcaaggacctgtgggccgtgcggctgttcgacgaggcccagaccgccgccacccggcggaccttccgggtggcccggcggcgcctgcagcggcgggcctggcggatcgacatcctccaggagatcttcgagccccaggtggacgacaagctgttcttcaagcggctgaacaacagcggcttcgtgttcgaggacaaggacgcccagctgcagtccccctactccctgttcgccgacaaggccttcaccgacaaggacttctacaagaagtacaagaccatctaccacctgcggcgggccctggcccacggggacgggaagttcgacatccggctgtactacctggccatccaccacatcgtgaagtaccggggccacttcctgttcgacggcctgtccgtgggcgaggtccgggacgtgaagcggctgttcgaccgcctgaacgaggccagctcccaggtgttcggcgacgacgcccccgtgtggaacagcgaggtggccgacaagttccgggagatcgccctctgccgggacaaggccctcaacgacaagaagaaggcctgcttcgacctgttcgagtgcgccgacagcgtgcgcaagaaggccgccgtgaccctgatgctgggcggcaaggagaagcccaacaacgtgtacgcctccggcgagtacaaggaggagaagagcttctccttcggcgagctgaccgacgaggagtacgacgccaagcgggagatcttcggggacgacttcgagtacctggacgccctgcacggcatctacaactacctgatgttcgagcgggtgctgtccgggcacgacagcgtgtccgacagcatgatcgccctgtacgacaagcacaagtccgacctgcggaagctgaagaacctgatccgggacgggctgtcccacgacgagtacgtggccatgttcaagtccatcgacgagaagcacaactacgtgaactacatcgggtacaccaaccgcggcaagaagaaggtgaacgtgaagaagtgcaagcccgatgagttcttcgcctacgtgaagaagttcctgatcgagcggcgcgaggtgatcgccggcaagggcgagtactgcgtgaacgtgtgcaaggagatcctggtggagatcgacaacaagacgttcatgcccaagatcctgaacgccgacaacggcctgttcccctaccagatcaacaaggaggagctgtcccggatcctgaacaacctgtgccgggactacccccagttcgggatcgccgacagcgacggcaagtccgccgccgacaagatcatctccctgttcgagttcaagatcccctacttcgtggggcccctgaacacctaccacagccagttcgggggcaacagctgggccgtgcggaagcaggacggcaagatcctgccctggaacatcgaggagaagatcgactacgaggccagcgccgagaagttcatgcggcggatgaccggcaagtgctcctacctgcacggcgaggaggtgctgccccggtgcagcatctactaccaggccttcgacgtgctgaaccagctgaacaagctgaagttcaacaaccagcccatctccgtgcagcagaagcagaacatcttcaacgacctgtttctgcgggtgcggagggtgaccgacaagaccatcatcaactacctggtgaagtgcgggcagatccccgcctccgaggccgagcagaccatcctgtccggcaaggacggggacttcaaggccagcatgtccagctacatcaccctgtgccagatcctgggggagaacttcgtgaagaaccacctggacatctgcgaggacatcatcctgctgcacagcctgcacaccgacaagaagaccgtcgggcggatcatcgaggagcggtacgggaactacaacgagatcaagatcgccctgtccaggctgaaggggatcacctccttcaaggacttcgggcggctgagccggaagttcctgtgcgagctgtccgggggcaccctgcccaccggggcccccaggaccatcctggacgagctgtacgagaccaacaacaacctgaacgagctgctctacggggagcagtactgcttctccgagagcatcgcccaggagaacggggagatcgacgggaacatcacctacgagaccctggaggacatgtacatctccccgcaggtgcggcgcggggtgtggcaggccctgaagatgaccgacgagtgcgtgcgcaccgtgggccgcctgcccgacaagatcttcatcgaggtgacccggggcggcggcaacaagggcgagcgcaccgtcagccggcagaagaagctggccgccctgtacaacagcgcccggcaggccgagtacgacatcgccgagctgaccaaggagctgaaccggcagtccgacatggagctgcggaaggagcggctgtacctgtacttcctgcagctgggccggtgcgcctacagcgacgagcccatcagcctggaccagctgaacagcgacatgtacgacgtggaccacatcgtgccccgggccctgaccaaggacgactccatcgacaacaaggtgctggtgaagtccgagctgaaccggaagaagaaggacatctaccccgtgtgcgccgccctgcccagcgagttcgagcgggccaagcggctgtggaagaccctgaacagcgtgagctaccagaacgagaagctgatgtccgacaagaagtacgccgccctgacccgggtggcgcccctgaccgacgacgacctgcgggacttcatcaaccggcagatcgtcgtggccgggcagagcgtgaaggccgtggccgacctgctgaagcgcaagtacggcaccgaggtgaagatcgtctacagcaaggccagcaacgtggacgacttcaagcagcggttcggcatcatcaagtgccgggagaccaacgacctccaccacgcccgggacgcctacctgaacatcgtggtgggcaacgtgtacgacaccaagttctccagcgtggccacaatgcgctacgagaaggacggccggtccctggagtacaacttcgaccggctgtacaacaagccgatctccggcgcctggaacggggacgggtccatcagccacgtgaagagcgtggccgccaagcactccatgtgcgtgacccggtacagctacaccgggaagggcgagctgtacaacgccaccgtgtacggcaaggacaagggcctgatcgcccggaagcagtccgggccctactccgacaccgagaagtacggcgggtacaacagcctgaccaccgggtacttcgcggtgatccagtccaaggacaagaaggggaaccagatcaagacgatcgaggccatccccgtgctggtggccgagaccgagaagacccagaagggcgccttcatgcggtacctgaccgacgtcagggggctgaaggagcccaagatcatcctggacaagctgaagatcaagagcctgctgaagtacaacggcagctacctgtggatcgccggcaagtccaacaaccggatcatctacaacaacgccatgcagtggtacgccgacgacaagatcgacgcctacgtgaaggccctgaccaagctgtgctcctacaaggccaagaacatgctgtccgaggacgagctgaagcgggccgagtactacatcaacaccaaccggaagggcgacaagaagtccgtggtgaacgccgacgagaacctgcagctgtacgacgccgtgaccgagcagctggccaagcccttctacggcggggcctccggcttcacctgcgtgcggaagaagatgatcgccaagcgggccgagttccagaagctgtccgtgctggagcaggcccagaccctgctgggctgcatccacgtgctccagtgcaacggcagcgacgccgacctgagcaagatcggcgagagctcccacgccggcaagctggtgatcaacaacgacatcacggacgccgaggtgttcgtgatcaacctgagcgagtgcggcttcaccgagaagcggcagaagctctga

SEQ ID NO: 195 - DNA, 4017 bp, synthetic construct
  source 1..4017: mol_type = other DNA
atggagaagttctacctggggatggacatcgggaccaactccgtgggcatcgcctgcaccgacgagaagtaccggctgctgcgggccaaggggaaggactgctgggccgtgcggctgttcgacgagagcaagaccgccgagacccggcggatgttccgcggggcccggcggcggctggagcgccgcaagcagcggctgggcttcctgcaggccctgttcgcccccttcatcgacgacgagaccttcttcatccggctgaacaacagccagtactaccccgaggacaagagcgagctcctggggaagaacaagaacaacctgttcgccgacaagaactacaccgacaaggactaccacaaggacttccccacggtgtaccacctgcggcacaagctgcagaccgagcggatgagcgacctgcggctgtactacatcgccctgcaccacatcctgaagtaccgcgggcacttcctgttcgagggcgggatgaacgacgtgcgggacgtggggcggctgttcaccgagctgaacgaggtgtgcgccgacctgtacagcgacgccgagaacatcccctacttcgacccctcctacacccaggaggccaaggagtgcctgatgcgctccgacatgggcatccgggacaagcagccccacctggagtccctgttcggcaaggacgccatcatccgcgagatcatcaaggggatctgcggggcctccatctcccccaagaccctgctgggggactcctacaaggaggagaaggccttctccttcaagaagatcaccgacgagaccttcgacgccatgcagtccacctacggggacgacttcgccctgctggagaagatgcgggccatctacagctacatcgtgttcgagaagctgctggagggccaccccaacgtctccagcgcgatgatcaagctgtacgaggaccacaagcgggacctgtgccagctgaaggagttcctgcggaagaacgcccccgacgaggtgtacaagagcttcttcaagagcgacaaggagatcgccaactacgtgaactacgtggggtacaccaagcggggcgggaagaaggtcaaggtgaagctgtgcgacgacgagagcttcttcaccgccctgaagaagatgctgctgcagctggacggggtgaaggacacctccatcctggacggcatcatccagaagatcgacaacgggaccttcctgcccaagatcctgcacagcgacaacggcctgttcccccaccaggtgaacgaggacgagctggtgaagatcatcagcaacatggtggacgcccacccccagaccaaggagatggccgacaagatcctgcccctcttcctgttcaagatcccctactacgtggggcccctgaccgggaagaactcctgggccgtgcggtccagcgagaagatcaccccctggaacttcgacgaggtggtggacaaggcccagtccaacgagcggttcatgcggcgcatgaccaacaagtgcacctacctgcactgcgaggacgtgctgccccaggccagcatcctgtaccagaagtacaacgtgctgaaccagatcaacaagctgaagatcgatgacgtgcccatccccgccttcctgaagcagcagctgttcgaggagctgttcctgcggaagaagagcgtgaccgacaaggccatcatcaacttcctggtgcggaacggccagctggacgactgccgcaagaacatcgccaagatcaccgggaaggacggggacatcaaggccagcatgtcctcgtacatccgcctgaaggagatcctgggcgacttcgtggacgaggacctggccaagggcggggagatctgcgagaacatcatcctgtggcacaccctgaacaccgacaagaacatcgtgtgcgacctgatcctgaagaactacggggacatctccgtgatcaaggatcacatcaagcagctgaaggggctggtgttccagaagttcggccgcttcagcaagaagttcctgaccggcatcgacgccgcccagagcaactccggggcccggatctccatcctggacatcctgtacgagaccaaccagaacctgaacgagatcctgttcaacgagaagtacaacttcgaggaggccatcgccaaggagaacggcaccacctcctccgacatcacctacgaggacgtggagaacctctacgtgtcccccgccgcccggcgggggatctggcagtccctgcagatgtccgaggagtacgtccgggccatcgggaagatccccgacaagatcttcatcgagtgcacccgggaggacggccagaagggcgacaagggccggaagtcctcccggaagacccggctgctggactgctacaagtccatcaagaagtacaaggagtacgaggacatcttcaacgagctggacaactccggcatcaccgacatgcggctccggcaggagcggctgtacctgtacttccggcagctgggccggtgcatgtacaccggcgagcgcatcgacctggaggacctggccaccaaccggtacgacgtggaccacatcctcccccggtgctacatcaaggacgactccctggacaacaaggtgctggtcctgcgctccaagaacgccgagaagcgggaccggtaccccctgccccacgggttctccaaccagcaggtgttctggaagctgctgctggacaaggacctgatcaaggacgtgacctacaagcgcctgacccgggtggagcccctgtccgaggacgactacaacgacttcatcaaccggcagaaggtgatcaccgaccagacggtgaaggccgtggccgagctgctgaagcggaagtaccccgagtccaagatcgtgtacagcaaggccaagaacgtgtccgacttccggcagaagttcgacatctacaagtgccggaacaccaacgacctgcaccacgcccgggacgcctacctgaacgtggtggtggggaacgtcttcgacacctgcttctccacccccatgagcctgttctacaacaagaacgacgagtggcggacctacaacctgaagacgatgttcacccggaacgtcgccggcgcctgggacgacaacagcatcagcaccgtgaagaccatctgcgccaagaactccatggccgtgacccggtacgcctaccgggagaagggcgagttctacaaccagacggtctacgcccgggacgacaagggcatcaccctgccccggaaggggaagggggtgctggctgacgcccggcgctacggcggctacaagggccagagcaccgcctacttcgccatcatccagagcaaggacaagcgggggaaggtgatccgcaccatcgaggccgtgcccgtgctgctgcacgagcagtccaagaacgacttcaagatcctgaagcagtacttcgagaacagcgggctgcgggaggtggagatcctggtgcccgaggtgaagaacaagcagctgatctcctacaacggcatgcccctgtacatgacaggggtgtccgggagcaacatcctgtgctggaacggggtgcagttcttcagcgactccaagatcgacgagtacgtgaaggccctggccgagttctacgagcgctacggccgggagctggactccaagaccgacgagttctacatcatcaagaccaaccggatgggggaggtcaagctgaagatcgaccggcggcagaacgagagcctgtacaacatgctctccagcaagctggagggcaagatctactccgggatgaactactgcgccaccttccggaagatcctgacggacggggcggagaagttcaacaagctgaccgtggccaaccaggtcaaggtgctgctgcagatcctgaacttcttcgagtgcaacgccctgcgctccgacctgtccctgatcgggggcggggccatcgtcggcaccctgaagttcaacaagaacatcaccgacgtggacttccgcctgatctaccagagcccctgcgggctgaccaagcgggagcggaagatctga

SEQ ID NO: 196 - DNA, 4053 bp, synthetic construct
  source 1..4053: mol_type = other DNA
atgatcaagtactacgtcggcatcgacatcggcaccgactccgtggggatcgtgtgcaccgacgaggagtaccggctgctgcgggccaagggcaaggtgctgtgggccgtgcggctgttcgacgaggccaagaccgccaaggagcggcgcaaccagcgcaccgcccggcggcgcctgcagcggcgcgcccagcgcatcgacctgctgcaggagctgttctacccccacatcagcgacaagctgttcttcgcccggctgaacaacagcggcttcctgtacgaggacaaggacgagaagctgcagagcccctactccctgttcgccgacgagaactacacggacaaggagttctacaaggagttccccaccgtgttccacctccggcgggccctgatcgccggggagaagaagtacgacctgcggctgtactacctggccatccaccacatcatcaagtaccgggggcacttcctgttcgaggggcaggagatgtccgagatccgggacatcaagcggctgttcgacaacctgaacgagaccgccgacaacaccttcgacgagggcgcccccatcttcctggccgagaaggccgaggagttcaagaagaccgccatgagccggatgggggtgaacgacaaggtgaaggagtgctgcgccctgttcggcgtggggaaggacgagcgcaagaaggagatcatcaagctgctgagcggcggcaccggcaagacctgcgtgatcttcgacaacgaggagtaccgggacgagaagatctgcttcaagggcctcgacagcgagaccttcgaggccaagcagaccgtgttcggggacgacttcgactacctgtccaagatcaagtccatctacgactacatcgtgttcgagcacatcctgcaggggaacgcctacatcagcgacagcatgaccaagctgtacgacaagcacaagtccgacctgcggaagctgaaggacttcatcgtgaagaactgctcccacggggactacatcaagatcttcaagtccaccgaggagaagtccaactacgtgaactacatcgggtacacgaagaagggcaagtccaaggtgaacgtgaagaagtgcaagtacgacgccttcaagaagtacctgcagaacttcctggacaagaccccgctgagcgaggagcaggagtccgtgaagaaggacatcatcgaggagctgaagaacgacaccttcctgcccaagatcctgaacgccgacaacggcctgttcccctaccagatcaacctgtccgagctggacaagatctccgagaacctgtgccgggactaccccgagttcgggatcaagaccgacgggaacagcatcgccgacaagatccggagcatccacaccttccggatcccctactacgtggggccgctgaacaccagcgccggcatcaacgcctgggccgtgcggaagaaggacggccggatcaccccctggaacttcaaggacatgatcgacgaggccgagtccaacgagaagttcatgcggcggatgaccaacaagtgcacctacctgtacggggaggacatcctccccaagtgcagcatcctgtaccagaagttctgcgtgctgaacgagctgaacaacctgcgcatcaacgagcagaagctcagcgtgcagctgaagcaggacatcttcaacgacctgttcctgaaggacaagcggatcacctacaagaagatccgcgagtacctcgtgaacaaggggtacttcgccaagaacgaggagaccgggatcaacctgtccggcacggacgggggcttcaagagctccatgagctcctacatcgccctgaagtccatcctggggaacttcgtggactcccactccgacgtgtgcgagcagatcatcctgtggcacaccctgaacaccaacaaggacatcgtggccgagctgatcagcaagaacttcggctcctacaaggaggtggcctccaacatcaaggccctgaagggcctgtccttcaaggacttcgggaagctcagcaagcgcttcctgtgcgacatcaagggcggggtggacgaggagaccggcgccgtgtacaacatgatcgagacgctgtacaacaccgacaagaacctgaaccagatcctgtactacgacaagtacaccttcctgcagcggatcgaggaggagaacggcgacgccgacgacgaggtgacctccaagaccctgaccgacatgggcctgcccccgcaggtgaagcggggcgtgtggcaggccctgcagatggtcgacgagtacgtgaaggccctggggtgcccgcccgccaagatcttcgtggaggtgacccggggcgacgagtcccggggcaagaagaagggcgtgcggagcgtgccccggaaggcccagctgcagaacctctacaaggaggtgaaggacatcgacgagctcaagaaggagctcaaccgggaggaggtgaccgacagcaagctccgggaggagcggctgtacctctacttccggcagctgggcaagtgcgcctacagcggcgagcggatccggctggaggatctgggcagcaaccagtacgacgtggaccacatcctgccccagtccctgaccaaggacgacagcctggacaacaaggtgctggtgctgcgggcctgcaacgcccggaagagcgacaccttccccgtgcccgccgagtaccaggccaagatgcggaaggactggaagctgtggaaggagaaggggctgatctccgacaagaagtacagcctgctgacccggaccgagcccctgaacgacaacgactaccgggacttcatcaaccggcagatcgtgaccaccggccagatgtccaaggccgtggccgagctgctgaagcgcaagtacggggaggagaccaagatcgtgtacagcaagggcatcaacgtggccgacttcaagaacaagtacggcatcgtgaagtgccgggagaccaacgacctccaccacgcccgggacgcctacctgaacgtggtggtggggaacgtgtacgacacccggttctccggggtccaccgcatgttcgccaagcgcgaggacgactcctggcgccagtacaacctgaagaagctgttcgatcggcccgtgggcggcgcctggaaccccgacagcagcatcgagacggtgaagaacaccatccggcagagcgggatcagcgtgacccgctacgccttcacggagaacggcgccttctacgatgccaccgtgtacgagtgcggggacaccggcatcgacgccccgcgcaaggagaacctgcccaccgagaagtacggcgggttcaagagcctgagcaccgcctacttcgccatcgtgcggagcgtggacaagaagggcaagtccatcaagaccatcgagcgggtccccgtgctcaccgtgtacaagcagaagaccgacaaggacgccttcatcaactacctgaccaaccgggtggggctgaaggagccccagatcctggtggagaaggtgaagatcaagtccctgatggaggtgaacgggacccccgtgtggatcgccggggtgtccaagaaggacatcctgatccacaacgccgtgcagtggtacacggacgccgagaccgacaagtacgtgaaggggctggtgaagctggaggacatgaagaagtccggcaagctgtccgacaaggagctggaggagaaggagttcgtgctccacaccaaccggttcaacgagaacaagctggtggtggagcccaagctcaacatcgacctgtacaaccggatcatcagccagctggagaagcccatctacggcggcatcagcgccttcgccaccttccgcgagaacctgcggaagggctccgagaagttcaaggagctgcggtgcttcgaccaggcgtacgtgctgctgcagtgcatcaagttcctgaagtgcaacgccgagatcgccgacctgagcctgatcggcgccggcgagaagtccggcaagctgaccatcaacaagaacatcaccggcaaggacatcgtgatcgtgcacaccagcccctgcgggctgatcgagcgccgcaagaaggtgtga

SEQ ID NO: 197 - DNA, 4068 bp, synthetic construct
  source 1..4068: mol_type = other DNA
atgggcaacacccggggcaaggacaagtactacctggggctggacatcggcaccaccagcgtgggctgggccgtgaccgatgaccggtacgagatcatcaagcgccacgggaaggccctgtggggcatccgcctgttcgagcaggccaacaccgccgaggagcggcgggccttccggaccgcccgccggcggaccgagcggcggaagaaccggatctccctgctgcagcagctgttcagcgaggagatcgccgccaaggaccccggcttcttcgtgcggatgaaggagtccaagtacatccccgaggacaagcgggacctggagggcaagcggcccgagctgccctacaccctgttcgccgaccaggagttcaccgacgtggagttccacaagcagttccccaccatctaccacctgcggtacaccctgatcacccagatggacgagaagccggacatccggctgctgtacctggccctgcaccacatcctgaagcaccggggccacttcctcttcgaggggaaggagatcagcgaggggatgaacttcctggccgccgtggaggtgttcctggactgcctggaggagaacgggatcgagctgtccgagttccagcaggaggacaagatccgcaagctggaggagatcctgacctcctccgacagcagccggaccgagaagaagaagcagctgtgcggcctgttcgccggcgaggacaagcagaagatggccctggtgggcctgatcgccggctgcaaggtgaagctgtccgtgctgttcgacgaccgggccctggacgaggaggagcgcagcgagatctccttctcggacgacaactacgaggagtacatctcccaggtggaggaggtcctgggcgaccggttcctgctgatcctgtccgccaaggccatcttcgactggagcatcctgtccgacatcctgggcacctgctcctacctgagcgaggccaagatccagtccttcgagaagcacaagcaggacctgatcaagctgaagaacctgctgcggaaggaccgggcctgctaccggaaggtgttcggggagcccggcaagaccgccaactacagcgcctacgtgggcatggtgaagaagaacggcaagaagcagcccatcaacaagaactgctcccgggaggacttctacaacttcctgaagaagaccctgcaggacatcccctgcgccgagaccgaccggaaggtgcgggacgagatgctggaggagatcgagaaggggaccctgttccccaagcagatcctgcgggacaacgccgtgatcccctaccagctccacgagaaggagctgaacaagatcctggagaacgccgtgcggttctaccccttcctggagaagatcgacgaggacgggtactccgtgtcccagaagatcaaggagatcttccggttccggatcccgtacttcgtgggccccatcaacacctaccacaaggagaagggcgggaactcctgggcggtgcggatcgggaacaacaccgacaagatctacccgtggaacttctccaagaagatcgacgaggagcagtccgccgagcggttcatcaagcgcatgaccaacaagtgcacctacctgctcggcgaggacgtgctgcccaaggagtccctgctgtacgccaagttcaacgtgctgaacgagctgaacaacctgcggatcgacggcgagctggtgtccgtggagatgaagaagaagatctaccacgacgtgttcaagcggcacaagcgggtgaccggcaagcgggtgaaggactacctcatccgcgagggcctgatcaccaaggagcaggagctgtccggcttcgaccagaacttcaagtccagcctgaaggcctacatggacatgaagcagatcaccaccggcatcagcctgaccgagcagcagcaggaggacatcatcctggacatcaccctgttcgccgacagccccaagatgctgaagcggcggatcaagcagaagtacccccagctcagcgacaagcaggtgacccagctgagcgagaagaagtacagcggctggggccggctgagccgggccttcctggaggaggtggaggccgtgaaccccgagaccggggtggccatgaacctgatcaccgccctctgggagaccaacgacaacctgatgcggctgctgagcaagaagtacagctacgccgaggagatcgagaagcggaacgcctggggcgactccgagtccgagatctcctaccagaccgtgcaggacctgtacgtgtcccccgccgtgcggcggcccatctggcaggccctcaagatcgtgaaggagatcgagcacatcatgggggccgcccccgagcggatcttcgtggagatggcccgcgagcccggcaagaagggcgagcggaagatctcccggaagagccgcctgcaggagctgtaccgcttctgcaagaaggaggccagcgagctgtacgactcgctcagccagaaggacgagaacgagctgcggtccaacaagctgtacctgtactacacccagatggggcggtgcatgtacagcaacgaggtgatcgacctcgaggagctgttcaccaaccggtacgacatcgaccacatctaccccgcctccaaggtgatggacgactccctggacaaccgcgtgctcgtgaagtccgagcggaaccgctccaagtccgacaccttccccgtgcccgagtcctacgtgaagcaggccggggacctgtggcggaccctgtccgagaagggcctgatctccaaggagaagtaccaccggctgacccgccgggacagcttctccaccgacgagctggccggcttcatcgcccgccagctggtggagacccggcagtccaccaaggccgtgacccagatcctgaacaaggcctaccccaagaccgagatcgtgtacgccaaggccaaggccgtgagcgacttccggcagcagttcgacctgatcaaggtgcgggacctgaacgaccaccaccacgccaaggacgcctacctgaacatcgtggtggggaacacctactacgtgaagttcaccaaggacgccagctggttcgtgaagaacaaccccgggcggacctacaacctgaagaagatgttcgagaacgacgtcaagcgcggggacgagatcgcctggaccagcggcgggaaggggaccatccacaccgtgaagaagtggatgcggaagaacaacatcctgttcacccggaaggcctacgaggtcaagggcggcctgttcgaccagcagctggtcaagaaggggaagggccaggtgcccgtgaagggcaaggccgaggacacccggctggcctccatcgagaagtacgggggctacaacaaggcctccggcgcctacttcatcctggtgcagtccgacgacaagaaggggaaccccatgatctccttcaagttcgtgcccgtgtacctggcccagaagctggaggagagccaggagaacatgctccagtactgccgggaggagctcggcctgatcaacccccgggtgctgctgcccaagatcaagatgggcgccctgatcgaggtggacggcttccggatgcacctcagcgggcgcaccaacaaccgcctgctgttcaagggcgccaaccagttcgtggtgagcgagcgcatccagaagaccatcaagaaggtgggcaaggtgtgcgccgaccacgccatcaacaagaacgtggccgtgagcgaccgcatgggcctgaacgaggaggacctgaagcgggtgtacgacaccttccacgacaagctgaagaacagcatctacggcaaccagctgtccgcccagatcgacaccctggagaacggggaggacaagttcgtgcgcctgtccaaggtggagcagtgcctggtgctgaacgagctgctccacctgttccagtgccggtccgtgctgtccgacctgaccctgatcggcggccccaagcgggccggcaccatcctgctgaacagcaacatcagcaagctggagcacatcttcctgatcaaccagtcgatcaccggcttctacgagcaggtgatcgacctgaaggccctgtga

SEQ ID NO: 198 - DNA, 4074 bp, synthetic construct
  source 1..4074: mol_type = other DNA
atggagaagttctacctgggcctggacgtgggcaccgacagcgtgggcatcgcctgcaccaacgaggactacgagctgctgcgggccaaggggaaggacctgtgggccgtgcggctgttcgaggaggccaagaccgccgccgagcggcggtccaagcggaccgcccggcggcggctgcagcgccgggcctggcgggtggacctcctccaggagctgttcgagccctacatgtccgactccctgttcttcccccggctgaacaactccggcttcgtgtacgaggacaaggacgcccggctggggtccccctacagcctgttcgccgacaagaactacaccgacaagaccttctacaaggagttccccaccatctaccacctgcggaaggccctggtgtacggcgacaagaagtacgacctgcggctgtactacctcgccgtgcaccacatcgtgaagtaccgcgggcacttcctgttcgaggggcagtccatgtccgacatccacgacttccgggtcctgctggacaagctgaaccaggccgccgaggagagcttcttcgagaacacccccatcatctccgccgagaagagcgacgagctgaaggagatcgccctgaacaagagcctgcggctgaacgacaagaagaagaagtgccgcagcctgctgaacgccatgaagagccccctgaaggacatcgtgaccctgatgctgggcggctccgccaagccctgcgacatcttcgacaacgacgagtacaagcagctgaagagcatctccttcaaggggatgaccgaggacgagttctccgcctacgaggacaccttcggggacgacttcgcctacctgcaggccctgaagaagatctacgactacatcgtgttcgagcagaccctggacggcaacgactacatctccgaggccatgatcaagatctacgacaagcacgccagcgacctgcggcggctgaagaagttcctggcggagaactgtcctcacgagacctacctgaaggtcttcaagagcgtgagcgagaagaacaactacgccgcctacatcgggtacacgaaggtgggcaagaagaaggtgaagctgaagaagtgcaccgacaaggccgagttcgacaagttcctgaagaagatcgtgagcgaggtgaaggtgtccgacggggacaccgagaaggagaagctcctctccgagatcgagaacggggacttcctgcccaagatcctgaacgccgacaacggcaccgtcccctaccagatcaacggggtggagctgaaccgcatcctggagaacctgtgccgggactaccccgacttcgcctccgccgtggacggcgggctctccatcgccaacaagatcaagagcatcttcgagttcaggatcccctactacgtggggcccctgaacacctaccacagcaaggacggggacaaggggaactcctgggccatccggcggagcgaggggcggatcctgccctggaacttcgacgagaagatcgacagggccaagtccaacgagagcttcatgcggcggatgaccaacaagtgcacctacctgtactgcgagaacaccctgcccaagtgcagcatcctgtaccagaagttcaacacgctgaaccagctgaacaacctgaagatcgacgagcagcccatcagcgtggagctgaagcaggccatctacaacgacctgttcctgaaggacaagcgggtcaccaagaaccggatccgcaagtacatcgtggaccggggctgggcccccagctcccgggagagcgagatctccctcagcgggttcgacggggagatcaacgtcagcatgtccagctacatcatgctgaagaacatcctgggggacttcgtggacgagaacaccgacatctgcgaggacatcatcctgtggcacaccctgaacaccgacaaggggatcgtggagaacctgatcaagtccgagtacgggcacatcggcaagatcgccgagaacctgaagcgcctgaaggggatcacctccttcaaggacttcgggaagctgtccaagaagttcctcagcgagatcaagggggcctaccgggagaccggggaggtggccaccgtgatctccatgctgtacgagaccaacctgaacctgaaccgcatcctgtgggacaagcggttcacgttcatggaggccatcgacgccgagaacaacgtgtcctccgaggacatcgcctacggcgccctggaggacatgggcctgaacccccaggtgcggcggggcgtgtggcaggccctgaagatgaccgacgagtgcatcagcgccgtcgaccgggcccccgacaagatcttcgtggaggtgacccgggggtgcggcgagaagggcaagcggaccgagagccgcaagatgaagatcgagaagctgtacgagaccgcccacgacgtggacgagctgctctccgagctgaagacccgctccgagagcgacctgcggcaggagcggctgtacctgtacttcctgcagctggggaagtgcgcctacagcggccgccagatcagcctggacgacctgaacggcaacacctacgacgtggaccacatcgtgccccagagcctggccaaggacgacagcatcgacaacaaggtgctggtgtaccgggagtgcaacgccaagaagaccaacatctaccccgtgcccgagcagttccggagcatgcggaagatgtgggaccggctgaaggcccaggggctgatgtccgccaagaagtacagcctgctgacccggaccgagcccctggccgagtccgactacaacgacttcatcagccggcagctggtggtgaccggccagacggccaaggccgtggccgagctgctgaagcggaagtacgagaacagcggcaccaagatcgtgtactccaagggcagcaacgtgtccgacttcaagagcaagtacgacatcgtgaagtgccgggagaccaacgatctgcaccacgcccgcgacgcctacctgaacatcgtggtgggcaacgtgttcgacacccggtactccgaggcctggttcaagtcccgcgacacctacgacaagtggcggaactacgaccgcaccaagatcttcgaccgggagatcgacggggcctggcacggccaggacaccctggtgaaggtcaaggccaccgtggggaagtgcagcatcggggtgacccggtacgccttcaccggcaaggggaagttctacgacgagaccgtctacgggaaggacgggggcgcccagctgccccggaaggaggggaaggccgggtccccctccccctacgccgacgtggagaagtacgggggcttcaagtcccccttcaccgcctacttcgtggtggtgaagagcgtggacaagaaggggaaccccatcaagaccctggaggccatccccgtgatcgtggactacaagtccaagaacgacagccacgccgtgatgaactacctgtgcaacgtgcggcggctgaaggaccccaccgtgctggtggagaagatcaagacccacaccctgctggagatcaacggcacccccgcctggatcgccggcatcaccgggtcccagatcctgctgcacaacgccgtgcagtggtacacctcctccgagaccgaccgctacgtgaaggccctcgccaagctggacgaggccgacaagagcaagcggatctccgacgaggagcggaaccgggccgagttcgagatgagcaccaaccgcttcaaggaggtgaagtgcgccgtgaacgccatcaacaacctgaagctgtacgacgagatcatcgagcggctcggccgcaagatctacgggggcctcagctccgtgcggaccttccgggggaacctctccaagagccgcgagaagttcgtggctctgagcgtgatcgaccaggccaaggtgctgctgcagtgcgtgaagttcatgaagtgcaacgccgaggccgccgacctgagcctggtgggctgcggcaagcgctgcggcatcctgctgatcaaccagaacatcaccgacatgaacatcaccgtggtgcacaccagcgagtgcggcctgaccgagcgccggatcaagatctga

SEQ ID NO: 199 - DNA, 4116 bp, synthetic construct
  source 1..4116: mol_type = other DNA
atgatcgacaacctgtgcatcatggtggagatcgcccagatcaagtggtacaacatggtgaagtgcaacgtgatccagtggggcaaggtgatccagatgaagaaggactactacctgggcctggacctgggcaccggctccctgggctgggccgtgaccgacgcccagtacgagatcctccggaagcacgggaacgccctgtggggcgtgcggctgttcgacaacgcgaacaccgccgaggagcggcggctgttccggaccgcccggcggcggctggaccgccgcaaccagcggatcaagctgctgcaggagatcttcgccgaggagatcaacaaggtggacgaggggttctacctgcggatgaaggagagccgctacgtccccgccgacaagctggacgtgaagaagaagtgccccgagctgccgtacgccctgttcgtcgacatcgactacaccgacatcgactaccacaagcagttccccaccatctaccacctgcggcggtggctgatgaccaccgaggagacccccgacgtgcggctggtgtacctggccctgcaccacctgatgaagcaccgggggcacttcctcttcaccgggaacatcgagaacatcaaggagttcaacggcaccttccggcagttcatcaaggggctgcaggacgaggagctggacttcgccctggacatcaccgacgacaagaccgtcgacgtggagtccatcctgaaggacagccggctgaccaagaccaccaagaaggccaagctgatcaagctgctgggcgcccagaccgcctgcgagaaggccgccctgggcctgatctgcggcgggaaggtgtccctgcgggacatcttcggcaacaaggagctggacaactgcgagcgccccaagatcagcttcagcgaggccggctacgaggagtacgccaacgtggtggaggccgatctgggcgagcagttcgtgatcatcgagcgggccaaggccgtgtacgactggaccatcctggccgacaccctgaagtcctacacctccatcagcgaggccaaggcggcctcgtacgagaagcacaagaacgacctgatctacctgaagaagctggtgaaggagaacctgggcaaggactcctaccggaccatcttcgtgaagaccaacgagaagctgaccaactacagcgcctacatcggcatgaccaaggtgaacggcaagaagtgcgagatggtgggcaagcagtgctcccgggaggacttctacgccttcctgcggaaggaggtgatgaacaagatcgccgacgagaagaagaccgagtacctgcggtccgagatggagaagggcaccttcctgcccaagcaggtgaccaaggacaacggggtcatcccctaccaggtgcacctgtacgagctgcgggagatcatcaacaacctgaaggagcgggtgcccgtgctgaaggagaacgaggagaagatcgagctcctgttcaccttccgggtgccctactacgtggggcccctgaacgggatcaagaagggggaggacaccaccaactgggtgatcaagcggaagcaggagcggatcttcccctggaacttcgaggaggtggtggacgaggaggcctccgccgagcggttcatccgccggatgaccaacaagtgcacctacctgatgcacgaggacgtgctgcccaagaacagcatgctgtactgcaagttcatggtgctgaacgagctgaacaacctgcggatcgacgccgagcccatcagcgtggccctgaagcagcagatctacgagcggctgttccagcggtaccggaaggtgacccagaagaagctgaaggcctacctgctgcaggagggcctgatcgaccggaacgccgtgatcaccgggatcgacggcgacttcaagtcctccctgcgggcctaccacgacttcaaggagaagctgaccgggtgcgccctgagccaggacgagaaggagaacatcatcctgaacatcaccctgttcggggaggacaagaagctgctgtccaagcgcctggccaagatgtaccccaacctgtccatggcccagcgcaagggcctgtgcaccctgtcctacaccgggtggggccggctgtccaaggagttcctggagagcatcaccgccgtgtcccccgagaccggggagaacatgagcatcatccagttcctgtgggagaccaacgagaacctgatgcagctgctgagcgagaagtacgacttcgccaagaagatcgaggccgagaacgtgaacgaggagatccggaacttcagctacaacctgctggagcagctgcgggtgagccccgccgtgaagcggcagatctggcagaccctgcagatcatcaaggagctgaacaaggtgatggagcagcccccgaagaagatcttcgtggagatggcccgggagaaggccgagtccaagcggatggagtcccgcaagtccaagctgctggacctgtacaaggcctgcaagaacgaggagcggaactggatcgacgccctcgggaacaccgaggagcaccagctccgctccgacaagctgtacctgtactacagccagaagggccggtgcatgtacagcggcgagatcatccgcctggaggacctgtgggacaacaaccagtacgacatcgaccacatctacccgcagtccaaggtgatggacgacagcctggacaaccgggtgctggtcaagaagacctacaacgccgagaagaccgacgtgtaccccatcgccgccgacgtgcggaagaagatgcagtccttctggaaggccctgtgggagggcgggttcatctccaaggagaagtacgagcggctgtcccggtgcaccgagttcgaggccagcgagctggccgggttcatcgcccggcagctggtggagacccgccagtccaccaaggccgtggccagcatcctgaagcaggtcttccccgagaccgaggtggtctacgtgaaggccaagatcgtgtcccagttccggcaggacttcggcatgatcaaggtgcgggagatgaacgacttccaccacgccaaggacgcctacctgaacatcgtggccgggaacgtgtaccacaccaagttcaacgggaacgccacctggtacatcaaggagcaccccggccggtcctacaacctgaagaagatgttcaccagcgacaaggacatcggccggggcggcgagatcgcctggaaggccggcgagaacggcaccatccggaccatccggaagtacgtggacaagaacaacatcctggtcacccgccggtcctacgagatgggcggcgggttcttcgaccagcagctgatgaagaagggcctggggcagatccccatcaagtcctccaacgagcggctgtgcaacatcaagaagtacggcggctacaacaaggccgccggcacctacttcatgctgatcgagtccgaggacaagaaggggaacaagatccggaccctggagtacgtgcccctgtactgcaagaagcagatcgagcagagcgagcgggacgccctctgctacttcgccgaggaccgggggctgaagaacccccggatgatcctgaacaagatcaagatcgacaccctgttcaaggtggacggcttctacatgtggctgtccggccggaccggcaaccagctgctgttcaagggcgccgtgcagctgctgctgaccagctgcgacgagcggaccctgaagaaggtgatcaagttcgtgcagcggaagaaggagaacaagaacaccgtgatcgtggagcaggacatgatcttcgaggaggacgtcctgcacctctacgacaccttcctgagcaagctgggcggcaccgtgtaccacagccgcctcagcgcccaggagaagacgctgcgcgagaagcgggacgccttcaacgagctgtgcaaggaggaccagtgcatcgtgctgtacgagatcctgcacatgttccagtgccagtccggggccgccgatctgtccatgatcggcggccccaagaaggccggcatcctggtgctgaacagcaacatcaccgggtgcaagcagatctccatcgtgaaccagagccccaccggcatctaccagcaggagatcgacctgaagaccgtgtga

SEQ ID NO: 200 - DNA, 3345 bp, synthetic construct
  source 1..3345: mol_type = other DNA
atggagaagaccttccagaacaaggagcggcaggtgaagatgggcgtgcggttcggcctggacatcggggtggcctccgtgggctgggccgtggtgaacgacaactacgaggtggaggaggccggggccaacctgttcacctccgccgacgccaaccagaacgtggagcgccgctccttccggcagatcaagcgcctgcaccggcggcgccggaaccgcatctccgacttcaagaagctgtggcactccatgggcctggagatcccggccaccaacatcaacaacgtgctggggctgcgggtgaagggcctgaacaaccgcctgagcgaggaggagatcttctacgtgctgcggaacgagctgctgcaccgggggatctcctacctcgacgacgccatcgacagctccaccagcctgcagtccgactacgccaaggggatctccgagaaccagaaggagctggactccggctccttcccctgcgagatccaggtgaagcgcctggagaagcacgggcggtaccacggcaacatctccatcgggcaggacgacgagaaggtgatcctgtccaacgtgttcaccacgagcgcgtacaagaaggagatcctggccatcctggagcagcagaagaagttccacaagttcctgaccgactccttctgcgagaagtacatcgagatcttcctgcggaagcggaagtactacaccggccccggcaacgccaagagccggaccgactacggcaagtacaccaccaagatcaacaaggagaccggggagtacatcaccgagaagaacatcttcgagaagctgatcgggaagtgctccgtgtacaagaacctggagcgggccgccggggccacctacaccgcccaggagttcaacctgctgaacgacctgaacaacatcagcgtcaacggccggaagctgtccaaggaggagaaggaggccgtgatcaacgagaccaagacctccaactccttcaacatcaggaagatcctgaagaaggccaccggcgaggacatcgagaccctcaccggggcccggctggacaagaacgagaaggaggacttccacaagttcgcccagtacaacctgatgcggaaggagttcgagaagaacggcttcgacatcaccgccctgtcccgggagaacctggacaagatcgggcgggtgctgaccctgaacaccgagaaggaggccatcctgaacgggttcaagctggagggcctgagcctgcccgaggagatggccgactgcctggtgtgcctgcggaagcagaagggcagcttcttctccaagtggcagagcttcagcctggagatcatgctgaagctgatccccgggctgtacgagcagcccaagaaccagatggagctgctgtccgacatgggggtcttcaagacctccaaggacatcttcaagaactgcaacaacatccccgcctctgccatcctggagaacatctacaaccccgtggtgagccgctccatccgggtgaccgtgcaggtggtgaacgccctgctgaagaagtacggctacccggagcagatcatcgtggagatgccccgcgacaagaacgaggaggacatgaagaagcggatcgccgacgggcagaagaagaaccagaaggagctggacagcatcatcaagaagatcgactccgagtacgggatcaagatcaccgagcaggacttcttccagcacaagaagctggtgctgaagctgaagctgtggaacgagcagggcggcaagtgcctgtacagcgggaagaagatcgacatccacgacctgctgtacaaccccagcatcttcgaggtggaccacatcatccccaagtccatcagcttcgacgacagccggagcaacaaggtgctggtgtacagcaccgagaaccagaagaaggggaacaccaccccctacatctacctgaaggacctgaacgggaactggggctacaaggagtacttctcctacgtgtgccagctgcgcaagaacaacctgatcaccaagcggaagatggagaacctgctgttcaccgaggacatcaccaagatcgaggtgctgaaggggttcatcaaccggaacatcaacgacacccggtacgccagccgggtggtgctgaacaccctgcaggggtacttcaaggccaaggaggcccccaccaagatcaaggtggtgcggggctccttcacccaccagttccggaacaagctgtacctggagaaggaccggaaggagacctacgcccaccacgccgtggacgccatgatcatgtgctacagccagatgggcttcgacaagtaccacaagctgcagagcgagatcatcgacttcgagaccggcgagatcctggacatcaagcgctggaaggaggagttcaacgagaagacctacaacgagctcatctaccagaacaagatgatccagatccgggccaacatcaagaaggccgagaagcaggtgaagttctggcacaagcgggactccaagcccaaccggggcctgtgcaaccagaccatccgcggcacccggaacgacaacggcaccatcaagaaggtgaacaagctggacatctacgaccccagcggggtcgtgaccctgaagaagatgatctcccagggcaaggagaactgcttcctgatgtaccagcacgacaagaagacctgggaggacatgctccagatcatggaggagtacaaggaggccaagaaccccttcaccgagtacgagaacgagaccggggactacctccggaagtactccaagaagcacaacgggccccggatcaccaagctgaagtacctcgacggcgaggtgcgctcctgcatcgacatcagccacaagtacggcttcgagaaggggagcaagaaggtgatcctggagaactccaacccctaccggatggacgtgtactacaacaccaaggaccagaagtactacctgatcggcatcaagtactgcgacctgaagttctgcaaggacgggtacatcatcgacgaggagacctacaaccggatcctggtgtccgagaagatgctgaagcccgggcagacccggaacaacctggaggccctgggctacaagttcatgctgagcttctacaagaacgagatcatccagtacgagaagaacggggagcactacaccgagcgcttcctgagccggacgatgcccaaggcccggaactacatcgagaccaagcccgtggacgcccccaacttcgagaagcggaacgtcatcgggctggccaagaccaccagcatcaagaaggtgcggctggacatcctggggaaccagtactactccacctccgagaagttcaagaagatcgtggacacgatc

SEQ ID NO: 201 - DNA, 3465 bp, synthetic construct
  source 1..3465: mol_type = other DNA
atggacaagaacgacttcaagaagacgaagtaccacctggggctggacctgggcgtggccagcctcgggtgggccgtgatcggcttcgacaaggagaaggactccaagtacctgcacgacttcggcgtgcggatctggaagcagcccgtgaaccggaacgggaagtccctgaccctgatccgccgccaccagcggtccgtgcggcggctggtgcggcggcggcagcaccgcatcagccgcctgctgaacttcctggtgtccatcaagatcctggagaagaaggaggactactactcctggatcatctacaagagcgagaaggagaaggaggagaagaagcccctgaacctgaagctcaagggcctggccggcaagaagctgcaggccctggagctggtgacctgcctggtgaactacgccaagcagcggggctactccgagctgttcaccaccctgcaggagaacaagaacctggaggacgagttcatctacgacgagaccaagatcgacaagaagctgcaggagatcaagaactggttccagaagcacgagaacatctccgagaagaaggacaaggacaacgccaccaagaagctgaacacccagaagtacctgctgggcatgaagaacgccatgtcctgcgagaacaaggagaagttccccagcgaggtgatcaaggactggaaggacaacaagaccaacaagctgttcttccggaagtcctggcagaaggagatcaccgagctgctgagcaagcagttcagcttccactcccagctgaacgagaagaaccgggaccgcgtgctgctgatcatcttcagccagcggtacagcgaggacggccccgagaagaacagcccctacatccacaagatgttccacaacaagatggccctgagccccttctccagcgaggagaagaagaccacccagcactacaccttctgggtgctgtacaagttcatcaagatcatctccctggccctgttcgagcgggtgaccagcgacaacgacgaggacaagaccgtggacaagttcaacctgcagaagctgctgcccaactggaccgagttcgccgagagcctgatctacgagttcctgaagctgaacaagctgagcctgtccaagagccgggagatcctggagaacttcatcgagaagaagctgcagaagcacatctccgacgacgtgatccaggagatcaagaacaagctgaagaacttctggaccgagcggaagaacgacttcacccagttcaagctgttcgaggccttcaagaagatcatcttcggcaccaagatcaccaagaaggccctcctgaaggagaagaacctgatgaacagcatcgcctacaagatgtggctgaacttcaccctgaagaagcggcaggaggagttcgagaagatgaagaaggacaactcccggaccaccgaggagatcgacaagctgaacaagatggggaagtccctgatcgagtcccagtacagcgtgcccaaggcccccttcaagcagcacatggtggccgtgatcaacaacttcgtgaacaacgaccggttctgcgacgtgaacccctacatctacgaggagaaggagagcaggaagctgatcagcgtgtccgccgagaagctgcggaagcacaagatcttctccaagttcctgtccgagcacatcgagtaccgggtggacaacccggtggccttccgcagcatcaaccaggtgcggatcgtgctgaagaagctgttcgcgaagtacaagaacttcgacaacatcaccctggagatcggccgcgacctgaacaccaagaaggagcaggagaccatccgcaagcggcaggccgagaacaacaagcagaacaagaagatcgagaaggagatcaagcgggagctgggctacgacagcgtgaacagcaccaagcgcctgcggtacaagctgtggaaggagcagaacttcgactgcctgtactgcaaccagaagatcgagaaggagaagatcttctcgatctacacccacatcgaccacatcatcccccgcaccaccaccgtgaacaacagccacgacaacctggtgctgtgctgcaccgactgcaacctggccaagggcaccaagctgatccggatctggaaggacaacaagttccagaactggatccagtccatcgagaagaagctgaagctgaacaagaagaagatctaccacctgaagctgcagaaggaggacctgaacaacttcctgaaccgggacgccgtgaacaacagcatcatcggcaagttcttcaagaactacatcgaggtgaacctggccagcaagaacatgaacacccccgtgaaggtgatgagcgggcggatcacccggaagatccgggacaagctgttccggtggaccagctggggcatcgagaaggacgagctgcggaagatcacccgcttccaccacgccatcgacgcgatctgcatcgccctgatggacaagcagaagatcatcagcttcatcacggactggatcaacatcaaccggtacaccaagttcaacttcgagaagaacgagaagaacaacgacatcgacatcctgaagcccaagtggaagcactccatcaacaacttccagtacttcaccgccaaggagaagaacgtgatcaacaagatcttccagtccggcaccaaggtggacaaccgcctgctgttcgagctgttcaagatcaacagcaacttcgacaccgaggtggagaaccggatgcccgtgctgctgaacaagaccctggtggagaagaacggcaagaagaagatggagatcgaggtgtccgacgtgctggacgagaacaagtacctggagaagatcaaggagtacggctaccagggggacatccactaccccttcatctccaagcagatcatcaagaagatccccaagaccctgtccggggagcagcccatcaagctgaagggcaaggaggacaaggacgagtacctgtccaacgagtcccagaccaactactgggacgcccggaagtactacgggttcaacctggaggggcagtggctgctgaacaagaacttctggaagaagaagcggcagacccggtactgcgagaagtgcaacaaggtgaagatcgggaaggccaccttctggatcgacgagaacaagaacgagcagttcatctgcaagaagtgcttcaagaaggagaacttcagcagcgtctggaacaagaccaagttcatcacccagaacgagaccctggagtggaagatcaacgagcactactactactacagcttcctgggcaagcacgggaacgccatcgacctggagtccctggggctgaagaacttccgcttcgaccccaagtccaagaacttcaagaagaactcccccgagaaggggttcagcgccttcctgaagaagttcaagaacaacgagatcaaggtgctgaacatctccctgctcgggaagaagcagacccgcagccgg

SEQ ID NO: 202 - DNA, 4065 bp, synthetic construct
  source 1..4065: mol_type = other DNA
atgtactacggcgggatcgacctgggcaccagctccgtgggctgggccctgaccgacaccaactaccggctgatccggaagaagggcaaggacctgtggggcgtgcgcctgttcgacgaggtgaagagcgcccaggagcggcggtccaaccggaccgcccggcggcgccgggcccgggagaccgcccggatcggcctgctgaagagctacttcgccgacgagatcgacaaggtggacaccggcttctaccagcggctggaggagtccaagtaccacaaggaggacaagaagaccggcaaccggttcgccgtgttcgccgaccgggagttcaccgaccgggagtactacgagaccttccccacggtgttccacctgcggaaggagctcctggagtccgacgcccccttcgacgtgcggctggtgtacctggccgtgctgaacctgttcaagcaccgcggccacttcctgaacgagtacctggagtgggaggagcacgacaagaacatggccgacctgttccgggagttctacgagaccctcccggaggagagcgagctgcacttcccccagaccgccgactggaccctgaccgaggagatcctcggcagccggctgttcagccggtccgagaaggcggagaagctggccgcctgcctgggcatcgtgcggaaccagaacaaggccgagtacgagatgatcaagctgttctgcggcatgagcggcaagctggccctgatcttcggccaggagatcgccgccgatgcctacggcaagaagcagctgagcttccggagctcctcctgcgaggaggagatggaggccctgggcgactgcctgcccgagggctacatggacatgatcgaggccgccaagcggatccacgacaagggcctgctggcccacatcctgaagggccacacctacctgagccaggcccgcgtggagacctacgagaagcacaaggaggacctgaagaagctgcggcacgtcatgaagaagtactgcaaggacgagtacgacgcctacttccggacgatgaccgaccacaactactccgggtacgtgggctccgtgaactccggcaaggagaagatccgccggaaccggggcgccaagaaggaggcctacaaggccttctggaaggagaccaagcggctcctgaacctgatgccccaggaggaccaggaggtcttctacctgaagcaggagctggagaaggagaccctgctgcccaagcagcggaccttcgagaacggggtgatccccaaccaggtgcacctggccgagctgaagaagatcctctccaacgccgagaagtacctgcccttcctgcgggagaaggacgagaacggcctgaccgtgaccgagcggatctgcaagctgttcgccttccggatcccctactacgtggggcccctgtccgtgaagggcggggagggccggaactggatccagcggaaggagaccggccgggtgctgccctggaacatggaggagaagatcgacatggccaagacccgggaggccttcatcctgaagatggtgcggcagtgcacctacatgaagggcaagaacgtgctgcccaagaacagcctgcggtacgaggccttcatggtgctgaacgagctgaacaacgtgaagatccgcggggagaagctcgacgtgggcctgaagcagaagatctaccgcgagctgttcctgaccgggaagaaggtcaccgggaagaagctgttccagtacctgtgcgtcaacgggatcctgtcccccgacgagcaggaggccgtgaccgggatcgacgagaccttccaccagtccctgaccagctacggccggttccggtccatcctgggggacgagatcgagaaccgggagatgcagaagatggccgagcagatcatcttctggggcaccgtgtactccaacgacaagaagatggccggggagctgatgcgggagacctacggcgagctctccgagaagccctacctgaccgagtcccagatccgccggatctccggcttcaagtggaaggactggggccggctgagcaaggacttcctggagctgcagggctgctcccggaaggacggcgtgaagcggtccctgatccgggccctgtgggagaccgactgcaacctgatggagctgctgggcgccgagttcaccttccgggacaccctgaccggccagatccaggagcaggagaagctgctcggggagttctgctaccacgacctggaggactcctacctcagcgcccccgtgcgccggatggtgtggcagaccatcctgatctggaaggagctgtgccagctgatgggcgaggcccccgcccgcctgttcgtggagatgccccgcggggagggcgagaagggcaagcgcaccgtgagccgcaagaagcggctcgaggagctgtaccaggcctgcaaggccgacagccggaactggctgaaggagatccaggacctgagcgaggacgacctgcggtcccgcaagctgtacctgtactacacccagcggggccggtgcatgtacaccggccaccccatcagcctggaggacctgctgctggggaaccggtacgacatcgaccacatctacccccggcacttcctgaaggacgacagcctggagaacaacctggtgctggtggagaaggagtccaacgggcacaagtccgacaccttccccatcgaggccagcgtgcggcgggaccgccaggggctgtggaagtccctgaaggacgggggcttcatcagccaggagaagtacaagtgcctgacccggtcctgggacttcaccgacgaggagctggccggcttcatcagccggcagatcgtggagaccgggcaggccaccaagtacatcaccggcctgctggacaggctgctgcccgagaccgagatcgtgttcgtgaaggccggcaacgtgtccgccttccggcaccagaccgagctcctgaagagccggctggtgaacgacttccaccacgcccacgacgcctacctgaacatcgtggtgggcaacgtgtactacaccaagttcacccagaaccccgccaacttcatccgcgcctaccggcgcgaccagaagggcaacgcctaccacatggacaagctcttctggtacgacgtggtgcgcaacggggccgtggcctggaaggccggccaggccggcaccatcggcaccgtgcgggccatgatggcccgcaacaccccgctgctgaccaagcgggtgtacgaggcccacggcggcatcgccgagcagaccatctactccgccggcgaggccaaggagcgcggctacatccccgtgaagagcggggatgagcggctgcgcgacgtgaccaagtacggcggcttcagcagcgtgagcggcgcctactacttcctggtggagcacgagaagaagggcaagcgcgtgcggaccctggagcagatgcccatctacctgaagacctccctggagaagaacgaggaggcctggaagaactactgcatcgagaccctgggcctggtgagccccgagatccgctggaagaagatccggatgcggagcctggtgaagcggaacggctacctgatgaacctggccggccgcaccgggcggcagatctacgccgagaacgccgtgtccctgtgcctgtcccagaagtgggtgaactacatcaaggggctggagaacttcaaggagtccggcaaggaggaggaccggcgggagaacaaggagaagcggatcaccaaggagaagaacgagctcctgtaccaggagctggtgatcaagcacagggacaccatctaccggcggaagcccaaccccatctggaccaagctgatcgagaagcaggccgtgttcgccgagctctccgtgcgggagcaggtgaacgtgctgctcgagctgctgaaggtgacccagtgccagaacctgagcatggacgccaaggagatcggggtgaaggcctcccccgacaagatcgggatcgaggtcaccgcccaggaggagttcctcctgatcgaccagtccgtgaccgggatctacagctgcaccatcgacctgaagaccatc

SEQ ID NO: 203 - DNA, 4065 bp, synthetic construct
  source 1..4065: mol_type = other DNA
atgggcaacacccggggcaaggacaagtactacctgggcctggacatggggaccacctccgtgggctgggccgtgaccgacgaccggtacgagatcatcaagcggcacggcaaggccctgtgggggatccgcctgttcgagcaggccaacaccgccgaggagcggcgggccttccggaccgcccgccggcggaccgagcggcggaagaaccggatctccctgctgcagcagctgttcagcgaggagatcgccgccaaggaccccggcttcttcgtgcggatgaaggagtccaagtacatccccgaggacaagcgggacctggagggcaagcggcccgagctgccctacaccctgttcgccgaccaggagttcaccgacgtggagttccacaagcagttccccaccatctaccacctgcggtacgccctcatcacccagatgaacgagaagccggacatccggctgctctacctggccctgcaccacatcctgaagcaccggggccacttcctgttcgagggcaaggagatcagcgagggcatgaacttctccgccgccgtggaggtgttcctggactgcctggaggagaacgggatcgagctgtccgagttccagcaggaggacaagatccggaagctggaggagatcctgaccagctccgacagctcccggaccgagaagaagaagcagctgtgcgacctgttcgccggcaaggacaagcagaagatggccctggccggcctgatcgccggctgcaaggtgaagctgtccgtgctcttcgacgaccgggccctggacgaggaggagcgctccgagatctccttcagcgacgacaactacgaggagtacatctcccaggtggaggagatcctcggggaccgcttcctgctcatcctgagcgccaaggccatcttcgactggtccatcctgtccgacatcctggggacctgcagctacctgtccgaggccaagatccagtccttcgagaagcacaagcgggacctgaacaagctgaagaacctgctgcggaaggaccgggcctgctaccggaaggtgttcggcgagcccggcaagaccgccaactactccgcctacgtggggatggtgaagaagaacggcaagaagcagcccatcaacaagaactgcagccgggaggacttctacaagttcctgaagaagaccctgcaggacatcccctgcgccgagaccgaccggaaggtccgggacgagatgctggaggagatcgagaaggggaccctgttccccaagcagatcctgcgcgacaacgccgtgatcccctaccagctgcacgagaaggagctgaacaagatcctggagaacgccgtgcgcttctaccccttcctcgagaagatcgacgaggacgggtacagcgtgagccagaagatcaaggagatcttccggttccggatcccctacttcgtggggcccatcaacacctaccacaaggagaagggcggcaacagctgggccgtgcgcatcgggaacaacaccgacaagatctacccgtggaacttctccaagaagatcgacgaggagcagagcgccgagaagttcatcaagcgcatgaccaacaagtgcacctacctcctgggggaggacgtgctccccaaggagagcctgctgtacgccaagttcaacgtgctgaacgagctgaacaacctgcggatcgacggggagctggtctccgtggagatgaagaagaagatctaccacgacgtgttcaagcggcacaagcgggtgaccggcaagcgggtgaaggactacctcatccgcgaggggctgatcaccaaggagcaggagctctccgggttcgaccagaacttcaagagctccctgaaggcctacatggacatcaagcagatcaccaccgggatcagcctcaccgagcagcagcaggaggacatcatcctggacatcaccctgttcgccgacagccccaagatgctgaagcggcggatcaagcagaagtacccccagctgagcgacaagcaggtcacccagctgtccgagaagaagtactccgggtggggccggctgagccgggccttcctggaggaggtggaggccgtgaaccccgagaccggggtggccatgaacctcatcaccgccctgtgggagaccaacgacaacctgatgcggctgctgagcaagaagtacagctacgccgaggagatcgagaagcggaacgcctggggcgactccgagtccgagatctcctaccagaccgtgcaggacctgtacgtgtctcccgccgtgcggcggcccatctggcaggccctgaagatcgtgaaggagatcgagcacatcatggggtccgcccccgagcggatcttcgtggagatggcccgcgagcccggcaagaagggcgagcggaagatctccaggaagagccgcctgcaggagctgtaccgcttctgcaagaaggaggccagcgagctgtacgactccctgtcccagaaggacgacaacgagctgcgcagcgacaagctgtacctctactacacccagatgggccgctgcatgtactccaacgaggtgatcgacatggaggagctgttcaccaaccggtacgacatcgaccacatctaccccgcctccaaggtgatggacgacagcctggacaaccgggtgctcgtgaagagcgagcgcaaccggtccaagtccgacaccttccccgtgcccgagtcctacgtgaagcaggccggggacctgtggcggaccctcctggagaagggcctgatctccaaggagaagtaccaccgcctgacccggcgggacagcttctccaccgacgagctggccggcttcatcgcccgccagctcgtcgagacccggcagtccaccaaggccgtgacccagatcctgaacaaggcctaccccaagaccgagatcgtgtacgccaaggccaaggccgtgagcgacttccggcagcagttcgacctgatcaaggtccgggacctgaacgaccaccaccacgccaaggacgcctacctggacatcgtggtggggaacacctactacgtgaagttcaccaaggacgccagctggttcgtgaagaacaaccccgggcggacctacaacctgaagaagatgttcgagaacgacgtcaagcgcggggacgagatcgcctggaccagcggcgggaaggggaccatccacaccgtgaagaagtggatgcggaagaacaacatcctgttcacccggaaggcctacgaggtgaagggcggcctgttcgaccagcagctggtcaagaaggggaagggccaggtgcccgtgaagggcaacgtggaggacacccggctggcctccatcgagaagtacgggggctacaacaaggcctccggcgcctacttcatcctggtgcagtccgacgacaagaaggggaaccccatgatctccttcaagttcgtccccgtgtacctggcccagaagctggaggagagccaggagaacatgctccagtactgccggggcgagctggagctgatcaacccccgcatcctgatccccaagatcaagatgggggccctgctggaggtgaacggcttccggatgcacctgtccggccggaccgacaaccggctgctgttcaagggcgccaaccagctggtggtgtccgagaacatccagaagaccatcaagaaggtggggaaggtgtgcgccgactacgccatcaacaagaacgtggaggtgtccgacaagatgggcctcaacgaggaggagctgatgcgggtgtacgacaccttcgacgacaagctgaagaacaccatctacggcaaccagctgtccgcccagatcgacgccctggagaacggcaaggagaagttcgtgcacctgagcaaggtgcagcagtgcctggtgctgaacgagatcctgcacctgttccagtgccggtccgtgctgtccgacttcaccctgatcggcggcttcaagcgggccggcaccatccggctgaacagcaacatcagcaagctggagcgggtgttcctgatcaaccagtccatcaccggcttctacgagcaggtgatcgacctgaaggccctg

SEQ ID NO: 204 - DNA, 4245 bp, synthetic construct
  source 1..4245: mol_type = other DNA
atggacaagaacaagccctactacatcgggctggactgcggcaccagctccgtgggctgggccgtgaccgacgaggagtaccacctgctgaaggggacccaccggatcaagtccgagaagggcaccaagaacaagaagcagaccctgtggggcttccgcctgttcgacgaggcggacaccgccgccgagcggcggacccaccggtccgcccggcggcggggcgcccgggccaagacccggctgaagctgctgcggatgctgttccgggacgagatcgtgcaggtggaccccgagttctacctgcggctgaaggagtccttctactacgaggaggacaagaagctgcagaagaactccaagaacaccctgttcaacgacgccaacttcaccgacaaggacttccacaagaagtaccccaccatctggcacctgcgccaggccatcatcaaggccgacaagatcgagtccttcgacatccgcctgtacttcctggccatccagcacatcctgaagcaccggggccacttcctgttcgacgggaagctgaagaacgggcggggcgacttcggcgagatcttcgccgagttctgcgacatcgccaagagctacggcctggagatcgaggagtccatgcagtccgaggtggagcggatcatcctgtccgactccaccatcacggacaagaagaagcagctgaaggacctcgccctgttcctggagcaggacgaggccgaggacgccaagacgctgctgcggcagcagcggtgtctgtgcgacctcatcgccggcggcagcgtggacctcgccaagctgttcgccctggagctggacgagaagtgcagctacaccctgagccagctggacgagaaggaggacgagatcgccgggaagatcaccctggacaacatgcccctgctggtgagcgccaagaagctgtacgactacggcatcctgtccaagctgctgggcgagcacagcatgctgagcgacgccatggtggccaactacgagcagcacaagaaggacctgaaggagctgaagcgggtgttcaagccccacgagaagatctacgcccagctgttcaaggacaacaagtactccaagaagagcaacaagttcgacgtgtccaagaacagctcctacgacgcctacgccggccacgcctaccagaaggagggcgaccggaacgggcacgtgatcgtctcccaggaggacttcaacaagcacctgaagcggctcctggaggaggtggggtacaacggcgagctgctgacccgggccgagaagggctacctgctgcccaagcagcggggccaggccaaggggaccatccccatgcagctgcacgccaacgagctggaggtgatcctggagaagctgcagcgggacttccccagcttcgccaaggtggtgcccggggaggacgagacctgcaacaacaaggccaagaagatcatgaagatccacgagttcaagatcccctactactgcggccccctggtgaagcggaagttcgacgacgacggcaactccgtcgccaacggcaagtcccagttctcctgggccgacgaggagatcgtgaagctggtgtacccctggaacttcgacaagctggtgaacaaggacaagcgcgccaagaacttcatccggcgcatgaccaacgagtgcacctacctgatcggggaggacgtgctgcccaagtgctccctgatctaccagaagttcatggtgctgaacgagctgaacaacctgaaggtgaacggccaccggatcgacaacagcatcaagcagcagatcttcgagcgggggtacaaggagggcgagatcaaggggaacatcaccctgaagaagctggagaagtggtgcaaggacaacagcttcatcggcgccgacgacgagctgtccggcaccaacgaggtgaagatcctgcccaagtaccagacctaccaggacttcagccgggtgctggggatcgacttcgagaagaagtaccccgccaccaagctggagaaggtgatcgagctgatcaccatcctgtccgacgagaagtccatcctgaagaagtccatcaagaccgagctcaactgcgacgacgagctcaccacccacctgtccaagctgtcctacaaggactgggggcggatgtccgcctgcttcctgaacgggatcaacatcaacaaccgcaccatcatcgagtacctgtgggaggacaacaacaacctgatggagctgctggggcaggaggtgggcttcgggaaggtggtggaggagttcaactccgacaagcggtccaaggccaccaaggtgaactaccgcgacatcgagaagctgtactgctcccccgccgtgaagcggtccgtgtggcagaccatcaagatcgtgaacgagctgaccgagaacctcgggtacgcccccaagaagatcttcctggaggtgacccggggcgaggacgagaaggccaaggggaagtacaccctggcccggaagaaggacctggaggccaagctgaaggccgtgaagaccgaggacacccgggccatcatccgggagctcgacggctacgaggaccgcgacctgcagtccaagaagctgttcctgtacttctcccagatggggaagtgcgcctacagcggcgagtccatcaacctggaggagctgaactcctccaggctgtacgacatcgaccacatctacccccgctccaagaccaaggacgactccatcacccggaacctggtgctggtgaaggccagcctgaaccgggagaagaccaacacctaccccatcagcgacagcatccggaacaagatgcacgccatgtggggcgcctggtaccactccgggctgatcaccaaggagaagtacgagcggctgatccgggggtccgagctcaccaacgacgagctcgggggcttcatcgcccggcagctggtggagacctcccagtccgtcaagtccatccgggacctgctggcccgggcctaccccggcaccaacatcgtgatggtgaaggccgggcaggtgtccgagttccggcacatgatgtcctgcgacaagaaggactgcgacgggaacgtgtaccggcccggcaagtacgagttcatcaaggtgcgggacatcaacgacctgcaccacgccaaggacgcctacctgaacatcgtggtgggcaacgtgatcaacgagaccttcaccaacgacccctacaagtgggtgaaggaccggaacgggaaggagtactccatcaaccagaagcggatcttccgcgagtccaaggtgtaccggaaggccaacggggaggagacctcctaccccgaggtgcaggcctggcagttcgccgacagcatcaagctgatctccgacgtgatgaagcggaacgacgtgatctggacccggatgaactacatcgagtccaaggagatcagcgacctgcagctggtcggcaagggcaagaacgccgacgggctgctgtccatcaagcagcagaagcggctgaaccccgagaagtacgggggctacaacagcctgaagggcgcccacttcgccctgatcgagtgcaaggacaagaagggcaacgtgcagcgccggatcgtgcagatccccatcatcgccaaggacaacatcgagaagtacatcgccaacaactactccgaggcgcaggtgatcctgcccgtgatcaagtacaagtccctggtgaagatcaacaacttccccctgcacatcgccgggaagaccagcagcggcctggtgctgtacagcgccaagcagttcctggtggacgaggacaccagccgctacctgaagctgatccagaaggtgatcggcaagatcaaggccgccaagaaccactacgaggccagcagcaaggacgccgtgtcccagtccgagaacatcaaggtgatgcggaagatctgcgaccggctggagatcctgtccgagatgcccagcttcggggacaaggtgcaggagatcaagaagtacaacgagctgaagttccagaacctggacctggagtcccagtgcaacatcctgaacaacatgatgaaggtcaccaagtgcaacgccgagaccggcgacatcagcatcctggtgcccaagtccagccacctgggcaagcccacgatgcccgaggacatcatgccccggtacagcgccgtggccctggtgaaccagagccccaccggcctgtacgaggagatcgtggacctcaagaccgtccagcccaagatcaacaagcagggcgagaac

SEQ ID NO: 205 - DNA, 4374 bp, synthetic construct
  source 1..4374: mol_type = other DNA
atgaagaagctgtcgatcgccatcgacatgggggccaagaacaacggcatcttcatggtgaagaccgacggcgacaagatcatcgacaagaaggcctcctgcatcgtgatcgacggcaacaagatcaacttctccaagaagtcccggcggaagaaccgccacaaggaccgcaactacaagcggcggaagctggccaagcggctgctggacgagctggtggacatgagccagtacgaccagaagcaggccgagttcatcttcggcaccctgaacaaccggggctacaccctgctgagctccgagaacgagttcgaggagctcagcgacgagacgatgaagttcaacaagctgtacctggaggccatctccgggcaggccaccaaggagaagttcgagctgtacttcaccgacgagttcgacgacgacaaggccctgctgaacttcctggacaccaacatcaagaacatcaagaagaccatcagcaacctgatcaacttctccaagaaggacaagatcctggacgacctggtgagcctgaagaccaacagcatcaagaagttcaacgccttcagccacgtgaagatcctgctgtccaagtacggctaccgggacctggggaagaacgagaaggacatcaccgagaagctgaagaacaacaacatctacctgtccaagttcgacttcgacaaggagaagcaggacatcgagtccctgaacttcgacaaggagtccgtgaaggacaagtccatcatcaccaaggacctgaagctgctcaaggagttcctgagcggcatccagaaggagatcgccaccggggccaagccccggaagcagtacctgaaggagatcaaggaggagatcgagaagcagttcgacttcatccagaacttcaccaaggacgagttcttcaacatcgtgggcaacatcagcaacctgcagctgcggatcctgcggaagttcttcaacaagaactccaccaagaactcccagctgcaggtgctgaagcggtacttcgtggccttccactacaaggacgaggccaagagccgccgcaagaagctgttcgtggagctgaacaagcacaacgacatcctgtccttcttcaagacctgcgaccccgagctgaccagccctccctacgaggacatgaacaaccgggacacctacaagtgcaacagcatgctgatcaagcccgagctgatcaccgacgacatcaagaaggccatcgacatcctgctgagcaaggacgagttcgccaccatcacgcaggagatcgacaagtccaccggggagttcaagcacatcggcatccgggacaagcgggtctccaagcaccagaagctgagccagaaggagctcagcaagtacaacaacaccgacaaccacgcccccatcatctaccagtccaccgactggacctacagcaagtacctgcagcggatcttcgacatgaagctcttcgacaagatcaccaagtacaagaacgccgacaagatctacgaggagaacttcaacagcttctaccacccccggaacgtgttcaagcacaccaagaagttcgagaagggcaagatcgacagcatcgagctgttcaagaagctgttcggcaaggacacctacgacagcctgaagcccatcgccgagatctactacaaggaggagcagaagatcaagaacgggatctacagccacgacaccagcgtgttcgtgaagtgcgggaccaacaccccgtacaagaacaacgccaagcacatcctgctgaagcccctgtacagctacagcttcacctccgacgagtccgacaagtacctggaggccatcaagaagacccgggggctgcagacccagctggagctgatctccaacgaggccaagaagcaccagaacggcttctacaacatcgtgaaggcctgcttcgacgacgacaagtgcgtggccgacaaggagatcaagaagatcatcaccaacctgaaccccaacctggaggccatccagacgatcttcaaggacctgaacatcgaggccaagtacttcaactccatcgagaaggtggacgagaacaacctcaccaccatcatcaacatcctgaagcagaccttcgagatcctgttcaaggagctgagcgggttcaacaagacctgccagaactgcaccaaggagaacgccacccggtccgaccagaccttccccatcgcccagcggctgctgagcgacgtggccaagcccatcgacggcatgctggacatgatgatcgaccggctggcccacgagatcaccaccaacatcgacaagtccgacatcgaggacatcgtccagctggacatcctgctggagcagaaccggttcgagttcgaggagaacctgaacgtgatcaagcgggccagcaacaaggacatcaagaagctgaagcgggagtacaaggaccggctgaacatcgacatctgcccctactccggcaagcagttcgacaagggcgactacgaccacatcctgccccagtccaagggggtgtacaactccaaggccaacatgatctacgtgtccagcgacggcaaccagaacatcaagggggccaccacctggacgctggacatgctgaagaagccccacctgaacacgatgttccacaccgacaacatcaaggagatcaaggagttcatcaagaccaacatcgcccggatcgaccagacgaacttcaccaacttcgacaacctgaagctgaacgagcagatcgccttccggtacgccctgttcatggagcacacctccagcgagttcaagaccgccttcgacctgctgaagaaggacaagctgaagaccatcaccaacgggacccagaagcggctggcccggctggtgtacgagaagctggtgcagaagttcccctacgagttcaacgccaagaacaagaacaagaccctgaagatcgacgtgaacagcaagaccatcgactacaagctggtcagcaccacccggcggtacctggccgtggaccagaccaccggggagatcaaccacctgttcaaggaggacatccaggacagccacagccactgcatcgacgccatggtggtgttctacctggccaactccgacgcccagaagatcaagcggtccgacaacctgtcggacaagatctccaagcgggtgttcaacttcgacttcaaggacatctacgtggaggagtcctccatcaacaacatcgccaagaacaagaccttcatcaacagccccaagaaggagctggggagctacaagctgttcgacgacaccatctacagcgagaactacaagcacatcaccaaggagaacaccaccaagaaggagctggagatcctggtgaagtacctgctgctgttcgtgtacgagaaggggaagaagatcgtgatcgacaacatcgagaaggtgaaggagaagacgatctacaagatcgacatccagaaggtgtccaacaccatctacaagctgttcaacaacaaggacaagcccgggctggtgagcctgaagttcctggacaagtaccagtacttcaccagccggaaggagatccagaacatcttcttcgacgacaagaagaccaagctgctggagtacgagaagatcaagaacatcccgtacttcagcaacaagctgtacaaggccgtgtacaagaagctgctggaggagaagaagctgttcgacatctccgacgacaagaagaccatcctgaacagcaagatcctggaggagctgctgcaggacatgttcgactccaagcagaaggccgagaacaagaagcagcggaagcgggggaagaagcggcacaagtacagcctgcccatcctgggcagccccaagttccgcatcaagcggggcaagacctggcaggtcctgggcaacaaggacatcgccaccaagaactacatcatcgacggcgacatcaagcccgtgccctacttcagcaagaacaccatccccctgaagatcaaggacctgatcgactgcctcctggtgaacaaggacgacaagaacatctacagcgtgaccatcgacaccaccaagatctgcgactacgtgagcaacctcacgtacctgatcaccgaggccaagcggtgcacggtgatcagcaccttcgtgaaggcctccttcgtggacgtggacatctcgagcgtgggggtgttcgacggcgccaaggacaaggtgttcgagagcttcatcgccaactacatcgacaacaaggacctggagctgagcaagtacatcggctccatccgggacggcatcaacgccaaggccaccatcgtggacaacaacaaccagaccatcaccctgaagtacaaggcctccatcaacaaggacaagaagcagatcatcctggacaacctgaaggacaag

SEQ ID NO: 206 - DNA, 4875 bp, synthetic construct
  source 1..4875: mol_type = other DNA
atgaacaacaaccaagtactctcccccattgcaattgatctgggcgctaagaacactggagtgtactttgcgcactatccagacctcgataatctgaataaggaggacctgaagaagttcagcagcatccgcacttttatcatggacaagaaaaccttctccttgctgatgaaagaccgcacagccaggcgacatcagaaacgggccaatattcggagtaaactggcaaaaagattcttcattcttatcgctcgccaggagtatcccgaactgtttgaggatgacaacaagattaacgagaatatcaagatcgctatatcttatttcttgaataggaggggctttagctttgctagtgctctcgagaagcttgatgacgaagataacaagctgttgggaaaactgccctctcatttcgtagagaaaatgctttcagccttggaaaagaacgaatattccaacggcaaagagattgccagactgatcagagccatcgtctctgacctgaatgaaaaggatctgaacctgcttgagttcgtgaagtacagaacaaattctcccaatgaatatagcgagctgcagaagctgctcagggttccgattgacgagtttaagaaagaactgcgaaaagaaattgccggcctggacaaaatcaacgaagacaaaaagaggaaaaaactgatcgcggataaaaaaaagaaaatcacagaggagtttacaaccaggtttggcatcctccggttcaatgattcagaacctaagctccccaacgatgaaaatggggaccctgactatagcatcagcgaagagtcaatccctgacgacataaacaacacaaacgagagactgaaccactactacaaatgggtcctctattacctcttcgaaataattaacgagactggaaactaccacaggaaagattactttgaaaactgtagaaaggactatgagtccgccaacaacgacacatctattggcaaatgcattaggcagctccgagagaagatcggagacaatcgaaagatagagtttcaaaacctgctcttcaacataagtaatttccagttgcggctcttccgcaagttctttaacaacaaagagcatcagactggcgacaaatgggagcccgaacgactggacaaaattttcataagatatatccggtcttggcatgtggacgctcaaaaggatggcgccgacaagctcaagatccgaaaagatatacttagtaactttcatagtcttatactgacccacggcagtcggaccataacttttttgaaaaacacgacccctaccgacactattccgccctacgaggatcagaataataggaacattccgaactgccagtcccttctcattaatctcgactacttctcaaacaagaagcagttcaagtacttcaacgaatggtacgaaatcctgactaccaagaaattcgccgccaatttggactctaagatggatcttagtctgtcagtggagatcaataacaccctgtccagttacgacaattatctgaagaggacacagagtaaaacacacagcattaatacatacttgaacaagatcatcaaagacactaagagcaggaaactggccttcgtcctggattctattagaacactgcataagggcaaaaaaaaggacgccgtcgagtatctcctgagccacatcgagcaaaacagcaataacaatgagatcaagattggtttctcagattttatttatcagtactattgggcaattgacaactccaagaacacaaaggttaatcagctgaaatatactgtgaataagaacgagaatcctgacccaaacattcagaagaactttcctaagtacataaaaaactatttcaagcagaactccatcctgcttgaatgtgagggaaaaaccccaagtaaaaacaacacgttcatcgagtctatctgtaatattctgctgatcctcaagagcgacatcaaggaggacttgatcaatgacaaaaataaaataaacgaactgcagaacaagcttattgacggcttgaaatcaaagaagataagccggtctagcgtctactcacacttggagaaatgcgcaaaagcccagaaggactataaaaacatactcaacgagaaactcaaggagattaagaacaaagaggacaccatcgacaaggaggataagcccctgaaaaatattagtgacaatattgagattgctaccgatgagattattaatgttgctaacacaactttccagattaataagcacttgatcgacagaactaagattaataatatatatacccacgctcaattgttctctttccttgacgaccggaaggggtactccaccatctgccggtactgcgtcgaggacaacctgatcagactcaccaagattaataacaccgagaagcgcatcacacataggctgtctgccagctctgttagaattattgacggtgtggtggaaaagtatctgggccatcttgcacgcattattgcgaatagtaaatggcaacagatcaagagttacaacctcgaaaaaggtgccacagtgaatataccagtctttatcgaagagaataagtttgactttgaggtcaatctttcaatctataagggtaagaatagcaagaaggtaaagaagtcaaagatctactccctcgaggacaggatcaaggacactaatatcgatatctgtccttacacaggcaaaaagatcaacaatatgggggagttggatcacatacttcccagaagctataccaccaagtacttcaaacaggtttttaactctgacgctaacctcatttacgtgtctcaagaagggaacagggataaggaggatagactgtacaagctttccaatctcaacaccaattatttgaaggttgtatttccggattgcaaggacacggacgagataagcaataagatcattgctaacatcccaaagattctcaaggactatagtaacttcgcgaacttgaatagcacggatcagcacatcttgcgccatagcctttttctcccagagaatcatccaatgcgcaagagagttattgaagaggtgctgatgacacacaataagactaaggtcaacggcactcaggggtacttttgcaaacttctgcgggacgaactgatccagagaaataatggggagttcaatctggatttttactttcagagaatccccgccctggaggtgtcttattaccgcaagacgttgtccaaggaagagcaaaagcaggaaaagcagccaccttactcccactgcatcgacgctatgctcatctttactacaggcatgctgaatatttttgacagctattccgacagtaacaagatagagaacctggtccccatacaacaatcttggaaacttgctaacgtcctgttgtctttgctcacatctaagagcaataagaatatacaggatacgaaacagctgttgcactccatctacagtctgatcaaggtgaatgagtctgaccactctgttattcctatcgagcgcagtacacgggacaccatcaacgtgagccataggaaactgtacgaagataacttctacgctctccgcatttaccccctgtggctgggttgtaaaaagcagaaaaaagagagcgagattatcctgtcctatggctttaatgaaaaaactatatccgatctgtcagtgaaaaacaaaaaattgattctgaagtacctttacctgctctccgaggacagtgtgacaaagctgagaaactgtggtatctccgacgagctgatgagtaagaagctcagcgatatcgagctgattgccgtcgaaaacaaactgcaaaattacttttctaccagcaatcagaaacttttttggttgaatattgaccgagccaagttcctggagttctataaagacaacaacatatacctgaacaaggaatccgacaaggatgaggatgttgtgtactataaagtcgtgtccaatgagcttacatacaaaacgaccagagaatctctttacaacatcttttatgacgagaaagggaatttcaataagaaaaagttgtccaaggagcatatcaaggaaagcactaatgaccccaatgttgaaaagatcctcctgaagatatacgacaatctgatcaagagtgctaatcctgatcttttcgctgacgacctgaagggtaagaaccgagacatagagatcttgaaagaaatctttcagaagcctcggattgagctgaaccatcgctcctacaaacagaagctgagtatcccaatcaatagcaaggatggagcctatattacgtaccgcaagggttgggacaacagtaaggttatccagatttctaaaaaaagcaacaacgtcccacagaaaaaatattatattgacacaagcaagctgaaagagcagaccaacgacatttacaacaccaaaaataataagtctatcgacgtgaatgacattatttcaaagcacgctatcgagattaaaaaggggacagagattaatatcaaaaaactccttattgatttcagcaaatacagtaactttcttaagactcttgacaacattattatcatccagataacaaacaggcttgatctggaactcctgttcaaacagaacgtgaagatcgacgacatcctgaagaagtccatccatactctgttcgacatcagaaacattgccgaggaaattaagaagaacgacgataaagatgtggaggatcgcgtcagtgaaaaaaccattgtggataagcatctgctgttttactccaatgtgaacagcaacagcgtgatcatgaccgtgaagggatgtaggaagtttatgggcaagtctttcaaaaagctgctccccaattatatccttaataataactga

SEQ ID NO: 207 - DNA, 4053 bp, synthetic construct
  source 1..4053: mol_type = other DNA
atgtccgagtactacgtgggcctggacatcggcacgtccagcatcggctgggccgtgaccgacaccaactacaagctgcagaagttcaacggcaagacgatgtggggcgtgcggctgttcgacgaggcccagaaggccgaggagcgccggatcttccgggcctcccggcgccgcctgcagcggcgcaagcagcgcatcgagtggctgcagaacgtgttcaaggacctgatcgggcaggtggaccccggcttcttccagcgcatgaaggagagctacttctggctggaggacaagcagctggacaacggccagcagaccaagtacgtcttcttcgccgacaagaacttcaccgacagcgactactacaagcggttccccaccatctaccacctgcggaacgcgctgatgcacgagtccagccccttcgacatccggctggtgtacatcgccctgcaccacatcttcaagtaccggggccacttcctgtccgacgccgacgccaaggccttcaaggccagcagcctggccgacttcagcaccaacatccagaaggtgaacgagtacctggacgacgccttcagcgacggccggtgcctgagcgtggacaacgtggacgacctgctggtcatcctgaccgaccagagcctgtccgcctccgcccgcttcgacaagatctgcgagcggttccccgtggagaaaacgatggagggggtgcggcagatcaaggccatcttcaagctgctgtgcggcctgaccgtcaagctggaggacatcttcgacaacgagctgctgcaggacggcgagatcaagaagctggacttcaagtccgacttctccgaccaggaggaggtcctgcggtcccagctgggggacgactacttcctgatcgacgtgctgaagcagatctacgacttcgtgatcgtgcggaagctgctgtccgagggcaacaccctgtccgaggccaagatcagcctgtacgagaagcacaagaacgacctgaagcggctcaagcaggtgatcaaggagcactgcccggacaagtaccgggaggtgttcaaggccaaggacaaggtggacaactaccccgcctacagcggccacgagagcgagaactaccggtgcaactacgagaagttccggctgttcctgaccaagaagatcttcaaggggctggagaacatccccgagatcacccagatcatctccgagctgaacctggagcggttcctgcccaagcagaccaccaaggagaactccaccatcccccaccagctgcacgagctggagctggaggcgatcctgaacaacgccgcccggtacatccccttcctgaacgagaagcggggcgacctgagcgtcaaggagcagatcatccagatgttcaagttcaggatcgactacttcgtggggcccctgaaccccaagagcgagaacgcctgggccgtgcaccggaacaccgagaagatcaccccctggaactacgacagcgtgatcgacctggacaagtccgccgagtacttcatccggaacatgaccgccaagtgctcctacctgggggaggacgtgctcccccagaacagcctgctgttcaccaagtaccacgtgctgaacagcatcaacaagatcaaggtgaacggctaccccatcagcgtggaggacaagcagaacatctaccggtacttcgagaaaaccgggaagaagatcagcccccggaccgtgcgggacttcctgctgtcctgcgggctgctgaaccagtccgacgagatcggcgggctggacgacgagctgaaggccgacctgaagatcttcaagacgatgcgggagatcctcggcgagaccttcgacgagaagatggccgagaacatcatcctgcatctgaccctgttcgccgagagccccaagcaggcccacagctggctgaagagcgcctacggcaagagcctgaccgaggaccagatcaagcagctgagccggctgcggatcaagggctggggccggctcagcagcgagttcctgaccaagatcgaggccgtggacgagcagaccggcgaggtgaccaacatcatcggggccctgtgggagaccaacaacaacctgatggagctgctgagcccccggtacgggttcagcaacgccatccagctgtacaagcaggagaagttcgggtcccagaagatgaccctgtcccagtacctggacgaggcctacgtgtcccccggcgtgaagcgctccatctaccagagcctggagatcgtggacgaggtgcagaaggtgatggggaaggtgcccccgaagaagatcttcgtggaggtgacccgcgaggagggggagaagcggcggaccaagagccgcaagaagaacctcgaggagctgtacaagtccctgtccagccccgaggtccaggccatccggagctacctggcccagtgcgacgagcagatgatccggaaggagaagctgtacctgtacttcctgcagctgggccggtgcatgtactccaacgagcgcatcgacatcgtggacctggagtccaagtacgacgtggaccacatctacccccagtccaaggtgaaggacgacagcctggacaacaaggtgctggtgcgccgggaggagaacggcaagaagggggacgtgtaccccctgctggacagcgtgcaggaccggatgaaggcccactggagctacctgctgcaggtgggcctgctgaccaagaagaagtacgagcggctcatccggcggacacccctgtccgacgaggagctggccgacttcatcgcccggcaggtggtggagaccagccagtccgccaaggtggtggccgacctgctgaagcggaagttcagcggcaagaccgacgtggtgtactgccgggcccgccacgtcaccgacttccggaaggaccaggtgatcgacaagaacggcgagcagaagcacatcgaccagtgcgtgcaccggaacttcgtgcgggagcaggaccccctgttcgtgaagaaccggctggtgaacgacctgcaccacgccaaggacgcctacctcaacatcgtggtgggcaacgtctacgacaccaagttcaccaagaaccccctgcactacatcaagcagcaggggctgaagttcacccggaacaagctgttcgtgaaggacatccccggggcctggatcgccaagggggacgagtccatcaacatcgtgcggagcatgatgcggaagaacaacgtgctgttcacccgcaagaccttcgagcggtccggggccttcttcgacgtgaccatcatgcccaagggcaaggggcagcggcagatcaaggcccacgacgcccggtacgacatcaagaagtacgggggctacaacaaggccaagggcgcctacttctgcttcgtgtcccacgaggagaagaagaagcggaagtactccatcgagaccgtgttcctgatgtacaagagcctgtacgagaaggaccccgtgcggtactgcgaggagatcctgggcctgtccagccccgtggtgctggtgcccaagatcaagatgaacaccctgttcagcatcgacggcgccctgctgcacctgagcggccggtccgaggaccggctgatcttcaacaacgccacccagctgtccatcgacccccagtggcacgtgtacatcaagcacctggagctgtgctccaagaacgacaccgtgaccaccagcagcaggatcgccagcgaccgcaacgagatcttcttcaaggtgctgctgcagaagctgaccaccaacgcctacagcaaggccctggagaccttcgccgagcggatggtgggcaccgagaagatcttcgcctccctgaccctggaggagcaggtgcagaccctgctgcagttcctgagcatcttcgcctgccgggccaccaccgtggacatcagctccctgcggatcaacgggaagagccccaagcagtcccggatccgcaggaacaacaccgtgaccgagagcaagcggttcgtgctgatcaaccagagcgtgaccgggctgttcgagaaggagctgagcctgaacgccctgatgaccaag

SEQ ID NO: 208 - DNA, 4023 bp, synthetic construct
  source 1..4023: mol_type = other DNA
atgaagaagtactacatcgggctggacatcggcaccgacagcaccgggtgggccgccaccgacgagtcctacaacttcctgcggctgaagggcaagaccgccttcggcagccgcctgtaccccaaggccaacgactgcaaggagcggcgcaccttccggagcaaccggcgccggatgcagcgccggaagtaccggatccacctgctgaacgatctgttcgccgaggagctgaacaagatcgacaagaacttcctcatccgcctggagaactccaccttcaacttcgaggacaagaaggacaagacctccgtgcggaccctgctgttcaagaccttcgaggaggagaagaactacttcaagaactaccccaccatcttccacctgcggaagaagctgctggaggacgactccaccagcttcaacgacctgcggaacctgtacctggccatccaccacatcatcaagtaccgcgggaacttcctgaaggaggggaagctggactacagcgacttcaacaacgagctgctgatccggctgaacgagatcctcaagaccatctacctggaggagaacgaggaggacttcgacggcgacttcatcaactccaacgacaaggagaacttcaagaccatcctcctgaacaagaacctgaacaagaccaccaagaagaaggagctgaagaagctcttcaacgtgtcctccgagctgtgcctggcctacatcgatctgttcgtgagcctgatcaccggctccagctacagcctgaagaacctgaagctggagtccgacaacaagatctccttcgaggagaacttcgacgagaaggtcctggagttcgagcagctgctccaggacaagttcgagatcgtgcagatcgccaaggagatctacgactacgtgagcctgaacgacctgctgaaggacgagaagtgcctgagcaacgtgatggtgaacgtgtacgacgagcacaagaaggacctggcgctgctcaagaaggtgatcatcaacatcgacaagcagaagaacaacgaccacaacctgtacaacgagatcttcaagaacaccaacaacaagaacaactacagcagcctggtgaaggtgaacaccatcaccgacaaaaagaccagcatcaacgacttcaacaaggagctgctgaagatcatcaaggagaacaaggacttcatctgcgaggaggactacaactacctggtgaacaagctggagaacaacgagctgctcaagaccatcgccaacgtgagcaccggggtgatcccccaccagctgcacctgaacgagctggagatcatcctgaacaacgcgatcaagtactaccccttcatcgccaccatcaaggacaagatcatcgccatcttcaagttcagggtgccctactactacgggcccctggacgaccgcagcaacttcagcaacgtggtgcggttcaacaacaaccaggtgtacccctggaacatcaacgaggtgatcgacgacaaccagacccggcagaagttcatgcggcggctgaccaacaactgccgctacctgttcgactgcaaggtgatgcccaagtccagcctgctgtacgagaagttcctgatcctggaccggctgaacgccatggaggtgaacggcagcctgctgtcctacaaggagaaggaggaggtcttcaggtacatcatcagccggaacaagaccaccatcagcaacctgaagtcctacctgaagaagatctacaacctgaacgacgacatcaccatcaacaagatcagcctggaggtgcccttcgaggcccccagccacgccctgctgaaccagttcttcgacctggagaccgagaacgagaaggtggagaacctgatcttcctggccaccgtctacgccgacgacaagaacatcctcaagaccatcctggagaaggacatcagcctggacaagaagcagatcaacgccatcctgtccctgtccaccaagaagtgggcccccttctccaaggagctgctgagcggcatctactacatcgacgacctgggcgtggccagctccatcatcgacatcatggagaaggagaccaagaacttccaggtcgtgctgaacgacagcaagtacaacttccagaccatcatccacgacttcaacaaggagaagcggggcgagctgaccaacaaggaggtcatcgacgacctcctggccaacacccccgccatgttccggcggagcatcaaccagaccctgctgatcctggacgacatcgtgagcatcacccaccaggaccccgagaagatcttcatcgaggtcacccgggaggacctgaaggaggacaagaagaagcagtacgacaagcggcaggacgagctgaagaagttcctgacctccctgaagaacgacgtggacagcctgatgaagtcccagagcaagaagctgctggaggagctgaacgatgagaacatcatcaacaagctcaagatcaagagcaagcacgtgtacctgtacttcaagcagatgggcatcgacgtgtacaccggcaagatcatcgacctgtccgacgtcctgaacagcaacaagtacgacaccgaccacatcatcccccagtccaagatcaaggacgacagcctggacaacctggtgctggtggagcggacctacaaccagcggatcaagtccgacgcctaccccatccccgaggagatcaagacccccgagatcctcaagctgtggaagtacctgttcaagatcaaggccatcagcgagaagaagtacaacaacctgatccggaacaaggagctgaccctgcaggagatggaggacttcgtggcccgccagatcaacgtggtgaactacagcaacgtggtgctgcgggacgtgctgaacatcaagtaccccaacaccaagatcgtgttcagcaaggcccagtacgccagctacctgcggaaggagctgaagatcgccaagaaccggaacctgaacgacacccaccacgccgtggacagctacctgaacatcgtggccgggaacatcctgtccacgaccttcagcaacgtccgcacccgctacatcgagcggaacatcgaggagaaaaccttcaacatggagcgggtgctgaactacaacctgaagaagaacgacctggccaacatcgtgaagaacaactgcctgcggcacgacgccctggtgaccctgaagctggagtacaacaactccaacctgtacaagcagaccatctacaaggccaactcctccgactccctgatccccatccacaccaacaactgcatgaagaacaccgacaagtacgggggctacctgaagttcaccacccacagcctggccgtgatcagctacaagatcaagggcaaggagatcaagaagatcgaggccctgaagctgatgaacctgaagatgtacaagaacaacttcgacgagctgatcaagtccctggtgaccgagaaggacgccacggacatcaagctcatcaagttcatcggcctgaaccagaagatccaggccaacgggggcatctactacctgtactcctccaacgaggacaagaacaagtacaagatggcctaccagaactacatcgacaacgacctgctcctgtacttcaacttcgccttcaagaagatcgaccagctgtccgaggacaacaccatcctgcagcaggagatcatcaccaacaagtacgaggagcacaacttcatcatcaccaaggagaagaacaagatgatcttcgactccctgatcaacaacagcttcaacaaggtgtacgacagctgcaactacatcgtgaagctgcggaacctgaaggacgacaactccttcaacgacttcagcctgaagaagcagatcgaggtgatcaaccagctgatcatctacatgagccgcaacagcgacagctccaacctgaagaactacttcagcaacctgagcaacgcccggatgctgctgagcaagaacatcaccaagaacaacatctacctgatccacgagtcccccaccgggctgtacaagtacaagaagctgctg

SEQ ID NO: 209 - DNA, 4950 bp, synthetic construct
  source 1..4950: mol_type = other DNA
atgcccaaccggctggtgatcagccccatcagcatcgacctggggagcaagaactccggggtgtacttcgcccactaccaggccgggagcttcctgggggagatcgagaaggagggcaaggtctaccagctggagaaggacaacttcaccctgatgatggtggaccggaccgcccgccggcaccagcggcggggctacaagcgccgccggctggtgaagcggctgttccggctgatctggtgccaggagttcggcctggagtgggacgacaagacccagcaggccatcgggttcctgttcaaccggcggggcttctccttcctgaccgaggagtacgacaccgaggccctgaagtgcttccccaaggacgccttcaacgagctgcccaagaagatccagaaggagatcgtggagatcggcgacacctgcaacctggacgagaagatgtccgagtggaagcagctggggcagcccgagatcaccaagatcttcgccaccgtggacgaggagtccaaggtgatcaaccggaagctgctgatgatcggccggaccaacctgctgaaggagtgctgcaagaagcgcatcgacggcaagcagatcgagaagaacaagcgcaaccagaagcagtactccctcagccagtggatcttcgacgagtgggacgacatgggcatcgtggggctgcacagcatccgggagaagggcaactccgtggacctggccgagaagctgaaccagcagaacagctccgtggccagcgagatcctgcacagcatccccaacgacctggacaaggagaaggccgagctgaacgccagcccctggaacttcaacagcaagaagttcaacctggagaagtccagcttcgagcggaagatcgtgagcggcaactccgcccggatcaagaacaagaacctgcaggccaagaagaagtggatccggacccacctgcaccacttcaccttcgccctgcacaccgtggtgcaggagctgagcaccggcgcccggcaccggagcaagtacttccaggagatcaacgacgtcctggagtgcgtgagccacgagcacgggtgcctgaacaccttctgcaacaagctgcagaccggggagacccggatccggaacggcaccagcctgacccccgagtccctggccaacctgatcggcaacatgagcaacctggagctgaagcccctgcggaagtacttcaacgacaagcggcacaagcagggggacttctgggaccggaaccggctgaagaagctgttcgggaactggatcctgcgggagtggcgggtgaaccccgagaaggacctgaacaaggcccaggacgccgagttcgactaccagaccctgcggagcaactggaaggtgcaccagggctccgtggtggacttctggctggagcagagccccagcttcaccatccctccctaccaggacaacaacaaccggcggccacccaagtgccagtccctgatcctgaacaccaagttcctggacaacaactaccggaactggcgcacctggctgaaggagctgctgttcctgcccgaggtgaacgagtacctgggcaactacaagaaggagatggaggagctgaagtccggcaagggcaccgcctacttccggggcgagctgaccaacaagccccagctcgactccgggcggcggaccgccaaggacctggacgcccggatcctgcagttcctgctggaccgggtgaaggacgaggacgtcctgaagctgaacgagatctacagccacaccaagaagttccgccaggagcagacctcccccgaggaccgggggaaggcccgggacaagctggagaaggccatcaactcctccggcctgtccgcggacctcaagacgccccggaactacaagtaccgggccgtcttcgccgagggctccttcatgcacctggtgtgcaactactacaagaaccggcagaaggcccggaagggccggatcttcatccaccccgagtaccggttcgtgaaggggcggggcttcgagaacaccggccggttcgacgaccgggaccacctgctgacctactgcaaccacaagccccggcagaagcggtaccagctgatcagcgacatcgccgggctgctgcagctgcccagccagcagctgaaggagcggaccaactccaacaacgacgaggacctgaccgagtggctgaagaacaacttcaagggcctcaagaccaactgcgcggacgccgccaaggcccagaagaagttccgcggccacctgaaggagaagatccgcgaggtgtgggacgggtccaacagccaggacaagctgttccggctggccaagaagtgcgtggccctgtgcgaggtgatcgggtcccggctgttcgacgacgaggcccagcggcagaagtggatccagaccctggaggaccggcccgccaacgccgtgttcctgctggcccagatcaacaacatcgccttcaaggagcggcggggcaacgcccggacctgcagcgtctgctccctggacaacagccagcggatgcagaccttcaagaacaacgtgaaggcccagcggctgccctccatccccacccggctgatcgacggcgccgtgatgcggctggcccgcatcctgggcggggccatcgccaaggacaagtgggcccggatcgagaaggacctgctgctgggcaccgaggtgcggatccccatcatcaccgagtccaaccggttccagttcgagcccaacctgctcgagctgaagcggccctacctggacgccaaggagtacaacaagcggaagcgggagctggacagctccctggactccagcaacctgaagaagatccagagctccaagaagagccggatcaaggggtccgcccagctgagcccctacagcggggtggagctgggcaacaccggggacatcgaccacatcatcccccgggcccaccccaagtgggggaccctgaacgacgaggccaacctcatcttcaccaacgagcaggacaaccgggtggtgaaggggaactccgagttcagcctgagcgacctgcacccctcctacaagaaccacgtcttcggcaccgccgacgactcccagatcgagaagatcatcaaggaggagatcggcaacgggcagggcggccagttcaacttcggccgctacttcaacttcatcgagctgaccgagcggcagcagaaggccttccggcacgccctgttcctgatcggcgacccgctgcggaagctggtgatcaacacgatcaaccaccgcacccggaccctggtgaacggcacccagcggtacttcgccgaggtgctggccaacaccctgtacaagaaggccaagcggatcaacaagcaccacctgctgtccttcgactacttcggggtggaggcccaggacaactcccggggcgacgggatccacaacctgcgccacgacctggtgacccactaccgggaggacctggacagctacagcaagagcgacagcagcccccagaagccctacagccacctgctggacgcccaggtggccttctgcatgatcgccgacgcccaccgggggtccggcgggctgcggctggagctggggaacaccgggatctggtcccgggtggaccagatgacccgggaggtggagaccaagaagtcccgggtccacgacgacagcctgttcaaggccatccaggtgaacccccggaacttccggaagatcagcctggagcggcggaagcccaaccaccagtacttcaagcaccggtccatccaccgggacgggatgtacgccgagcactacctgcccatcctgatccaccggaagctgttcgaggtgcggatcggcttcgactggaagaacagcttccagctgaagaacacccggcagtcccgcaagaagctgtacttcgccctgaagttcaaccccaagaccaagctgctggccctgaacgaggacgacagcttcgagcggctggagttccagctggcccagatcgggttcaactccaagatggactacttctgcatcagcctgaacacccagatgatccacagccactacatcgagcactacaacagctccgagggctaccaggactacagccccgagatgaacttcctgcggaacaccctgagctaccgcaccgagcggaagcggatcaccaagctcaacgacgccaagatcatcctgggcaacgagaagaacttcaagctgcccaaggaccagagctacctgatcctgcccgtgcggaacgagtgggccaagctgatcgacgcctgggagaactcccccgagagcgagaacggggagttcctcagcaagttcttcagccccaagcaccagcacccgcacaagaagttccggcaggactacagcctgcccatcaagagcagcggcgggcaccgcctgctgaagcggaagagctggaacaaccggcccatcttccagatcgtgaacgacagcgacagccggaccaccggcgccaaggccttcatccccgtgtgcaacagcgagggggagatcggcaagctgctgtccgagtccgccaagagccggaacaccttcttcctgaagaaggagaagtactacttcgagctgagcgacaccgtgaagctgatcgacaccgacaagtggcaccaggtggagctcagcgaggacctgaccaagctggggctgaccgagctgaagtaccagatcgacaacaacacccggcccggcatccgggtgaagttcgatcagctgctggcccgcggcaaggtggacgagatcttccagcacagcctgctgaagccccgctacctgaacaagctcaaggaggagttccagaccaacctgaactccaacgagctggagagcctggagtacaccgccttcgggttctccaaggacgtgaagcggtccctgcggaaggtgctgcagcagtactacttcggggagtccgacaagaac

SEQ ID NO: 210 - DNA, 4278 bp, synthetic construct
  source 1..4278: mol_type = other DNA
atgtcccacagcgacgtgatccccagccagagcctgctgagcagctgcctggctctggacctgggggccaagcacaccggggccttcctggtggtgcgggacgcctaccgccccgccaccagcagcgactgccacgccatgaccctggtgctgcccgacgacggggacaagatgacctacagcgcccaggcccggcgggccgtgcggcaccggctgcgcaacaagaagcggcacaacctggcccgccggctggccctgctgctgatcccccagaagatcaaggaggccagcatcacgctggactccaccgaggagcagaagctgatcgaggccatctgctccctgctgaagcggcggggctacagccggctggagagcgacagcgccaccgacctgaccagcctggagaacctggaccccgccgtgttcgccaaccacagcgagctggggcagttcttctgcgacgccgccgacatccccagccagtgggagaacctgacccaggacctgcagcagatcagcgccttcctgaacaagaagcccaccgacaaggccttcaagacctacttcagcaagaacttccccgacctgaagtcccagtccaaggcctactccaacgccctgaaggtgctgagcgacgacgccaacctgctgctgcagcaggtcaggttcggccaccggcaccggaagcagtacctggaggagatccaccaggacatgcggcacgacagccggctgaccaaggccgtgcaggccttcggggacctggaccggctgtggcgcctgatcgggaacctgtccaacctgcagctgcgggccatgcggtggtacttcaacgcccccgagctgttcgaggacaggttctggatgcccgagcggctgcagaaaaccctgatccgcgccttcaagtacttccactgcgagaagggcgcggagtcgcagaaccagcggcagctgatcaagaccctggagagcaccaccgacgtgttcgaggcgctgtgcaccatcgaccccgagcggaccatccccgtgtacgaggaccagaacaaccgccggcccccggtggacgagaccctgctgctgagcccccacaagctgaccgagaagttcggcaccatctggaaaacctgggccgacagcctgatcaagaaggacccggccctggaggagaacctggacctgatcctcgcctacacggaccggcggtcccggatcgccatcgccagcaacccccagcggtacagccccctggactaccggttcagctacgtgctgcagcgggccctggaccggtccaagaagctggaccggtacgccctgcggctgctggccaccgacgcccagagccagctggcccacaccgcccgggccgagctgtgccgggtgatcgggagccagcacgtggacgccttcatcgagatggccaagatgtactacgccgagaccgccgacgcccgggtggggctgtggatcgacgggcaggccaacctgctggagaagtccaacatccacccgcccatgaagaagcgggtgctgaaccagctggtgggggacgtgttcggcctggacgccgacttcggccgggccttcatcgagaactactggaactgcaagctggccgagaagagccggtccagcatgcggtccacctgccagttcatcgagaccgtgcggaagcagttcggcggggagttcaacctgctgttcaagagcaagacctccaccacgaaggacatcacgtccgtgaaggaccgcatcgaggacgtgaaggacttcctgaagaacaagctgcagctgagcgagcggaccatcgagcgggtggccaaccccttcagcctgtcccagctgtacaccctgatcgagctggaccggaccggcttcgccagcaccaccgtggccgtgcagctggagaacagctggcgcatgagcaccagcgacgggcagaacgcccagtgcagccggctgcccgccgactgcgtgcggcccttcgacggggtgctgcggaagctgctggaccggcaggcctacgagctggccaagtacaccttcgacgcctggaagaagaacgtgaagcacgacggcaccaccatccaccacgccaccgtggtggaggagaacaagttcgccttcacggccagcctggccaccctgaagaagaacaccgccgccaagaagaaggccaccgacgccctgcagcggcaggaggcgcggtggctgtccaaggacgagcggatcaaggaggccagccagaacatctgcgcctacaccggcgtggccctggacagctgcatctgcgagtacgaccacatcatcccccggaccctgaccaagagcgtgctgtccaccgccttcaacagcgaggccaacctgatctgcgtgagccaggccggcaaccagcagaagaaggacgcccggtaccggctgaccaacctgcacagcaagtacctggccgccatcttcggcaccaccgactgcaaggccatcgccgacaagatcgagaaccggatcgaggagctgaagcgcaaccggcggctgcggcacttcgagctgctgaacgccgaggaccaggcctacgtgcggcacgccctgttcctcgacgacggcagcgaggcccggaagtgcgtgctgagcgagctggccgccagcaaccggtccaaggtgaacggcacccaggcctggttcatccgctgctacctggagaagctgacccagctgagccgggactggctgaacaagcaccaccacaccctgatctgccaggccatgcggacctccaccgacgccacccggaagttccgcaaggccctggcccaggccgacgcggtgttcaccaaggaggtgatccagcccgtcgccagccacagcgtggacgccatgtgcgcctacgccgccgcctgcgtgtccgacgggttctgctacttcacccagtccgacaagcagctggcggacttcacccaggtggacctgctgaaaaccctgcacccccagacctgcaccgtgaactgggtgaccagcctgcccctggaggagaagaagaaccacgacagcaagcccctcttcaaggaggggatcctgtccgagaagttcctgcccatcatcacccaccagggcaagatcttcatcgggttcaccctgccccagaaaaccacccccaacagcgagaacgccatcctggtgcagggcgaggaccccacctacctgctgcggatcctggccccctacctgaacaacgacgtgaacgtcaacaacagcagcttctgcacctaccacatcaacaagcaccgggccttcgagctgttcagcaaggccgtgctgaacaagagcctgctgaccaaggaggagcaggaggccaccaacatcctggagggcctgcggtacgtgaccgagcggatccccgtgctgaaggggctgatcaaccagtccgggaaggccctgatccaggcccccagcgagttcaacaagagctacttcaacatctccttcaagatcacccacaccctgttcggggcctccgggaccctgatcctgcccgccaaggccgactggctgaagctgttcaagcaccccgacctgaaggacctcttcgggaaggacctggtgaccctggaggacatcgacctggagaactgcttccaggtgatccaccggatgaacgccagcaagctggcccacaccagcgtgaagcggatcccctccctgcccatcgtgcggaaggccagcgggggcttccgcatccggcggcagacgctgtcccacgaccacgtgtaccagctgtacaactacgagaccgccacctccggggagttcgcctgcaacgacaacggcagcgtgaactggaagaagcccatcctgttcgaccacctggtgaacaacaacgtcacccccttcgacagcaagcccaaccccaagcccgtcaagaccgtgaagatgcgcgacttccggcgcatctccgaggacaacgacatgctggtggacatcgcccccgccagcatcgaccggcggatcatccggatcacgatgaacttcgacaagctgaagaactggctgacagtggccaaggccgactgtcagcccatccaccccctggacctgcccgtgaacatcaagctgaaggagccccagctgttcatccccaaggacctgagcaccgcccggttcctggggatcccccgggacgggaagatccagttcaagcagatcggcagccgggtgaccttctggtacaccgtgcggaacagcacggacttcatgaaccaggccttcaacaacgctgcccgc

SEQ ID NO: 211 - DNA, 4119 bp, synthetic construct
  source 1..4119: mol_type = other DNA
atgaaggagtactacctgggcctggacgtggggaccaactccctgggctgggccgtgaccgacagcgagtacaacctgctgcgggtgaaggggaagatcctgttcggggtgcgcttcttcaaggagggcatctccgccgccgaccggcgggtgaaccgctccaaccggcggcggacccagcgcaagaacctgcggctggacctgctgcgggagatcttcgaggaggagctgaacaagaaggaccccctgttcctgaagcggctcgacgagagccgctactgggaggaggacaagaaggtggactccaagaacagcctgttcaacgacgagaactacaaggacaaggactacttcaaggacttccccaccatcttccacctgcggaacaacctgatgggggagaaccggaagaaggacatccggctgtacttcctggccatcaaccagatgatgaagcggcggggccacttcctcatcgatggcaacctgaaggacgtgaacgacgtgagcgggtacaaggagcggatcgagtacctgctcaacgaggagttcgacctggacggggaggacatcctggagaaggagttcttcgacaagatcttcgaggtgatcctgaacaagaaggagaacaagaccaccaagaagaaccagatcaaggagatcaccctgtcctacatcagcgacaagaccaagaagaagaagatggaggagttctggaacctgatcatcagcggcaagaactccgtcaagaacctgttcgacgacgagaacatcctgaaggagctggaggagaccaacaaggagaaggtggagatcgtgttcttcaccaccgacttcgaggacaaccacgagtacttcgagaacctgctgggcgagaagatcgagatcatcgacaccctgaaggccatctacgacttcgtgatcctgcagggcgtgctgaacggcgccaagaccctgtccgaggcccaggtgaagcgcttcaacgagcacaagaagcagctggaggagctgaagaagctcgtcctgaagtacaacccctccaaggagatctacaaccggatcttcaaggagaagaacaaggacctgcacaactacgtgtcctacatcggggtgtacaaggggaagaaggagaaggagaccatcaagaagatctccgccgacgacttctacaagttcctgaagaagcagttcaaggagctgtgctccgactacgagtccaacgaggacttcaaggagatcctgaacgagatcgacaagagcaactacctgctcaagcagatcgtgagcaccaactccaccatcccctaccagatccacctgatcgagctggagaagatcctggagaacctggagaaggacttcccctacttcaccaacatctccgacgggatcaagttcagcgagaagatcaagctgatcttcaccttccggatcccctactacgtgggccccctgaacaacgccaagggggagaacagctggatcgtgaagaaggaggggatgaagaacaagaagatccggccctggaacttcagcaagatcgtggacgagcacgagtgcgaggaggccttcatcaagcggatgatcaacatctgcacctacctgcccaacgagaaggtgctgcccaagtcctccctgctgtactccgagtacatggtgttcaacgagttcaacaacctgaagttcaacggcgagaagctgtccgccgagctgaagaacgagatcatcgagaacgtgtacaagcggtacaagaaggtgaccatcaagaagatccgggactacctgatcaccaacaactacgccaccaaggacatcgagatcaccgggtacaacggggacctgcacgccaacctggccagctacatcgacttcgagaacatcttcgggaacaacttcgaccgggacatggtcgaggacatcatcgagcagatcaccatccacgtgggcaacaagaagctgctgtccaagaagatcgccgagaagtaccccaacatcaccgagcagcagctggagaagatcgtgaacaagaagtacaccgggtgggcctccttcagcaaggagttcctctccaacctgaagggggtgtccctggagaccggggagcagaacacgatcatcggcttcctgaagagccagaacgacaacctgatgcagctgctgtcccagaactacaccttcatggaggacatcgacaagctgaacaaggagtcccgcagcgacaagctgtcctacgacgtgatcaaggagctgtacgtgtcccccgccgtgaagaagatgatctggcaggtgctgaagttcatcaccgagatcaagaagatcatgggcggcgagcccaagaagctgttcatcgagatggcccgggccgacgaggagaagaacaagcagaccaactcccggaagaaggagctggagaacctgtacaacgggctctccaaggacgacaagacctactggaacaaccagatcaaggagaaggaggagtactacttccggcggaacgccgtgtacctgtactacaagcagctgggcaagtgcatgtactccggggaccccatcgacctggaggacatcctgtccggcaagggggacttcgacatcgaccacatcatcccccggcacctcaagaccgacaacagcgtgcagaacaacctggtgctggtgaagcgcaacctgaaccagaccaccaagaaggagcagtaccccatcccctccatcatccggaacaacgagaaggtcaagaagctgtgggagttcctccgcagcaagaacttcatctccgccaccaagtacgaccggctggtccggaaggaggagctgaccgacgaggagctcggcgggttcatcgcccgccagctggtggagacccgccagtccaccaaggtgatcaaggacctggtgtccatgtacttcgagaacaccaccgtgatccccgtgaaggccgacctggccaactccctgcggaaggacctgtccttcgccaagtgcagggagctgaacgacttccaccacgcccacgacgcctacctgaacatcgtggccggggacgtgtggaacaagaagttcaccatcaaccccatcaacttcatcaaggagatcaacaaggaggggaaccggaaccggaagtactccctgtacgagttcttcaaggagaagcagttctccaagaaccgcggggagaagaacaagatctgggaccccgacatcgccaagaagaagatcaacaaggtgctgaacacctacaccctgctgttcaccaacgacacctacgagcagcggggcgagatctccgacgtgaacatcgtggggaagaagcagatcaagaaggggaccaagtacctggccatcaagaaggacgaccggctgaaggacgtgtccaagtacggcgggtacaacaagatcaagggcacctacttcttcctggtggagcacaaggagaagggcaagctgatccggaccatcgagtccctgcccctgcacaagaaggtggagatcaagaacatcgccgacctgcagaacttcgccgagaacgagctgaagctgatcgagcccaccatcatcatctccaagatccccaccaagaccgagctggagatcaacggcttccgctacctgctgaacggcaagaccgacaaccggctgtccatccagccgttcatgcagatgttctgggacaccaccgagatgtacgagatcgggaagctgttcaagaagtactcctacaacaccaagaccaagaaggccgaggacgagaacggggagaacaaggagaaggagatcttcgactcctccgacaaggagaacatcaagaagtacctgaagatcctgatcgagcggctccacaaggagccgttcaagaaccggatcaacatccccgagctgaacatcaacgaggagatggactccatcaagatgttcgagctgttcaaggagatcctgaacctgtcccggcgcaccctggagagcgtgaacctgacctccatcgggggcgaaaagacccagggcaagacccggatcaacaagaagctgaaccacaacgacagcatcaagatcatcctgaagtccctgaccggggtgtacgagaagaaggtggacctgaacaagtgcctgggcgagcagctg

SEQ ID NO: 212 - DNA, 4191 bp, synthetic construct
  source 1..4191: mol_type = other DNA
atggagtccaagaactactacatcggcctggacatcgggaccgacagcatcggctacgccgccgccgacgagtcctaccggctgctgaagtacaagggggagcccgtgtggggctcccacatcatcgaggaggccaacctcaagaccgagcggcggcagcaccggaccgagcggcggcggctggaccggcgccagcagcgcgtgaccctgatccgggagatcttcgccaaggagatcgccaagatcgaccccgacttctacaagcgggaggaggagtccgcgctgctggccgaggacgtgagcacctccaaggggctgttcacggacatcgggtacaccgacaagaagtaccacaagtcctaccccaccatccaccacctcatcaacgagctgatgacggacgccgccccgcacgacgtgcggctggtgtacctggcctgcgcctggctggtggcccaccggggccacttcctgagcgaggtgagcctggacaacgtggagtccgtggtggacttcaagacggtgtacgacaacctgaccgactacttcgccttcgagatcggctgcgagcccgcctgggacaacgccgatcccgacgagatcgagaagatcctggtgaagaagatcaagtccaccagcaagatcaacgagctgaacaacctgctgttcgggaagaagaagcccgagaccgagatcaccgacgccttcccgttcagcaggcccggcatcatcaagctgctgtgcgggaaggactgcagcgccaaggacctgttcggcaaggaggagtacgccgagatcaagtccctgaagctggacgacgacgagctggactccaacctgtccgagctcggcgacgacgccgagctggtgctgcggctgaaggccgtgtacgactgcgtgaccctgcacgacgtgctgggcgagaacaagttcatctccgccgccaaggtggaggcctacgagcagcacaagcgggacctggccgggctgaagaagttcatcaagaagtacgcccccgagaagtacaacgagatcttccggaaggtggacaagtccaccgccaactactccgcctacagcggcaacatcaagtccgacaagaacaccaaggccgactggaagaaggccacccccgagaacttctgcacctacatcctgaagatcgtgaacaacatcaccccggccgccgaggacaaggccttcttcgacgacatggtggcccgcctgcagaaggacgtgaacaccttcatgcccaagcaggtgaacggcgacaaccgggtgatcccctaccagctgtactacgtggagctgaagaagatcctggagaacgccgagaagtacctgcccttcctgtccgagacggacgaggaggggtacctgaccaaggacaagatcctgtccgtgttcaccttccggatcccctactacgtggggcccctgaacgccagcagcccctacgcctggatcaagcggaaggccgggcggatcacgccctggaacttctccgagatggtggacgggaacgagtccgagcagggcttcatcaacaagctgatcggggtgtgctcctacctgccgggcgagaaggtcctgcccaagcagtccctgctgtaccagcggttcaccgtgctgaacgagatcaacaacatcaccatcaacgggctgcggatctcccccgagatcaagcagctgatctacaacgacgtgttcaagaagaacaagaaggtgtccgtgaagaagatcaaggactccctgcggcagaacaaccacagcaaggacgacgtggagacgatcgccgggatcgacatctccatcaagtcctccctgtccagctacatcagcttccggcggctgctggagagcgggaccctgaacgagaccgacgtggagaagatcatcaaggtgtccacctacatggagtcccgcccccggttcaaggcctggctggagggggagtaccccaacctgagcgacaacgacgtgaagtacatcacgtccctgaagttcaaggacttcggccggctgtccgagaagttcctgtgcgccatcctgggcagccggaagaacaacgagaaggaggacaacggggaggccagctccatcatcgacgccctgtggaacaccaacaagaacctgatggagctgctgtccgacgactacacctactccgacgccatcaagcggtactccgacaactactacatggccaacggggtgaagtccctggacgagcgcatggacgacatgtacctgagcaacgccgtgcgccggcccatctaccgggtgctggacatcgtgtccgacatcgtgaaggccgaggggaaggcccccaacaagatcttcgtggagatggcccggggcgccaagcccgacgagaagggcaagcgcaccaccagccggtgcggcatgctgaaggccctgtacaagaccatcgacaccgatgacgtgcggcgcctggagcaggagctggagaagatgggcgacgaggccaactcccggctccagtccgagaagctgttcctgtacttcctgcagctggggaagtgcatgtacagcggcgaggagatcgacctgaacaacctgatggggaagcggtacgacatcgaccacatctacccccgcagcaaggtgaaggacgactccctgttcaacaacaaggtgctggtgaagtccaagatcaacggctccaaggacaacaactaccccctgccggagaacatccgggagaacatgtccggcatgtggaagaagctgctggacgggggcctgatcaccgaggagaagtaccggcgcctgacccggaaaaccgggttcaccgacgacgaggcctggggcttcatcaaccgccagatggtggagacccggcagtccaccaaggcggtggccaccctgctgaaggagtactaccccaacaccgagatcgtgtacgtgaaggccgggctggtgtccgagttccggcacgagaagaagctgtggaaggccatcctgcccgaggaggagcggtacctggacgactcccagatcgagccctggaaaaccgagctgtggaagtcccggaccgtgaacgacctgcaccacgccaaggacgcctacctgaacatcgtggccggcaacgtgtaccacgagaagtgcaccaagccctggtacctgtccaacaaggacaactacagcatcaacctgatctccctgtactccctgaccccctacatggtgggggagcgcaagatctgggacggggtgaactccctggagaccgtgtggaaaacggtgcacaagaacgccgtgcactacacgatctaccccttcagccggaagggcggcctcttcgaccagaaccccctgaagaagaacgccgacctgatcccccggaagaaggacctgcccgccgagaagtacggcgggtacaactcccccagcgtgaacttcttcgtgctggtgaagtactacttcgacaagaacagcgacgtgatgttcatgccggtggagctgtccgtggccgagaagtacatgtccgacctgaacttccggctgtcctacagccagaagcagctgggcaagatcctgaacaaggacaagaaggccgacaagaagctgaagatcagccgggtggagttccccctgggcaaccggatcatcaagatcaacacgatgatcgagctggacgggtaccgcatgtgcatcacggccaacagctccggcggcgccgagatcaaggtcagctccatgacgcccctgtgcctcgcccccgagtgggagttctacatcaagaagctggagaccttcgacgagaagaagaacaacaaccccaacatgatctacatggagaagtacgacgtggtgagcccggagaagaacgtcgagctgtacgacatcctgatcgacaagctgagcaacaccgtgttcaagaagcggccggtgaacccctgcgacgacctggccgacggcaaggccaagttcgccgcccaggacgtgttcaagcagaccaagtgtctgctgcagatcgtgggcatcttcggccgcatcaacaacgggttcgacctgcgggccgtgggcggcggccagtacgccgccaagagccggcggtccaccaacctgtccaactggaagaagtactactccgacgtgcggatcatcgacaccaccgcctccgggctgttcgagcaccggtcctgcaacctgctggacctgctg

SEQ ID NO: 213 - DNA, 4002 bp, synthetic construct
  source 1..4002: mol_type = other DNA
atgaagcagaacggcaacaacgagaagatcaaggagtactacgtggggctggacgtgggcaccaacagctgcggctgggccgtgaccgaccccgagtacaacgtgctccgcttcaagggcaagtccatgtggggcgcccggctgttcgacgaggcccagaccgccgccgggcggcggaccgcccggaccgcccggcggcggctggcccgccggcggttccgcctggacctgctggagtccttcttcgagaaggagatcaccaacatcgaccccctgttcttccggcggctgaagaacagcaacctgtacgaggacgagatcaaggccgagaccggggcctacagcctgttcaacgacaaggggtacaccgaccgggagtacctgaaggagtaccccaccatctaccacctgcggagcgagctgatccactccaccaagccgcacgacgtgcggctggtgttcctggccctgcaccacctgctgaagaagcggggccacttcctgtacgacaccggggacaacgacaacttcaagaacatcgacaccgccctggacgacctccagcagtacctggacgagaacgggatcccgttcgagatccagaacaaggaggagttcaagcgggccctgatgtcccggatcaagctctccgagaagaagaagaagctgaaggaggtctacggctccatcatcgacgccgaggagagcgacatcgatgtggccgagctgatcgacagcctgagcggggccgtgatcaagctgagcaagctgttctgcgacgagaccctgaaggagaccgagatcaactccctgtccctgggcgacgacctggacgagaagtacgacgccctgtccgccgccctggcggagcggctggacctgatcctgctgctgaagaacatcttcgacagcgcccggctgtccatcctgctggacaacaagaactacatctgcgacgccaagaaggccctgtacgagaagaacaagaacgacctgaagctcctgaagagctacatccggcggaccaacaagtccgcctaccgcaaggccttctaccccaaggaaaagaccaacaacttcgccgcctacacccggtacaagaccgagtaccagtgcaaccaggaggacttcctgaagttcctggagaaggagtacttcaaggagaaggaggagctcctgacccccgaggagaaccggatgtacgaggagatcaaggccgggaccttcctgaccaagctgaaggggtccgagaacggcctgatcccctaccagctggcctacaaggaggtgaagaagatcctggagaacgcctccgcctacctgcccttcctgaaggaggcccaggccgacggcctgaccaccgccgagaagatcgagcggaccttcaccttccggatcccctactacgtggggcccctgaacaagaaggccaagcactccttcatcgccaggaccgacgagaagatctacccctggaacttcgagcgggtggtggacctggacgccagcgccggcaacttcatggcctcgctcatcggccggtgcacctacaccaacgagcccgtgctgcccctgaacagcctgctgtacagccagttcgccgtgctgaacgagatcaaccggatctccgtgaacgacgaggtgatcccggtggagatcaagcaggccatctaccaggacctgttcgtgaagtccggccggaacgtcaccaagaagcagatcttccgctacctgaagcagcgcgggctcatcagcgacgccgacaagctgtccggcatcgacgacaacgtgaaggccaagctgaagagcctgcacgacttccagagcatcctggagaacggcctgaccaaggacaaccgggagatggtcgaggagatcatcgaggccgtgctggtgtacagcgacgacaagaagatgctgcggcggtggctggagaagaacatcaaggagctctccgacgaggagatcaagaagatctgccggctgaactaccgcggctgggggcggttctccaagaccttcctgcagaacatctaccacgtggacaagaacggggaggcccacagcatcatcgacatgctgtgggagaccaacgagaacctgatgcggctgatgagcgacgcctacagcttccagcagaagtgcatgaactacaagaaggagcacttcgacagcggggagtccatccggaagcagctggacgacctgtacatcgcccccagcgtgcgccggagcatctggcagaccctgcgggtggtggacgaggtcgtggacatccagaagggcgcccccgccaagatcatgatcgagatggcccgccccagcaagaaggacaccaagaagcagcggaccatctcccggaaggagaagctgatcgccctgtacaaggcctgcgacgagcagaaggacgagctgttcgaccggctgaaccaggagaccgacgagtccctgcggcgggacaagctgtacctgtactacacccagttcgggaagtgcatgtacagcggggagaagatcgacctgaccgaggccatgaaggacgacgagacctacgacatcgaccacatcttcccccggtcccgcatcgtggacgactccatcgacaaccgggtgctggtcaagagcaagctgaaccgggacaagtccaacgtgtaccccatcgccgaggagatccggcagaagatgcagcccttctgggaggtgctgcacagcaagaagctgatgagcgacaccaagtacaaccggctcatccgccacaccccgctgaccgacgaggagctgtccagcttcatcacccgccagctggtggagaccaaccagtccaccaaggccctggccaccctcctgcagcagctgtaccccaacaccaagatcatctacagcaaggccaagaacgtgtccaacttccggcggaagtacaaggaccacgggctgatcaagagccgggagatcaacgacctgcaccacgccaaggacgcctacctgaacatcgtggtggggaacaccttcgccaccaagttcaccgaccggttcttcatgcacatccacgagaacgccgccaagaacagctactccctgaccaagatcttcgaccacgacaccaagggcgcctggaagtccgacgggacctccctcaagaccgtggagaagtacatgaacaagaacaaccccatcgtgaccttcgccagcatctgcgtgaagggggagctgtacgaccagcagccccggcccaaggccaagaaggacgggagcctgttccccctgaagaaggggaagcccgtggagaagtacgggggctacaagaaccccacagggtcctacttctacatcgtggagcacacgaaggggaagaaaaccctgaccacgatcctgcccgtgtacctgtacaacgtggtggagtacgagcgggaccccatcgcctactcctgccagatgcacggcctggtgaaccccaagatcatcgtgaagaagctgcccaagaactccatgctggagttcgacgggatccggctgctgatcaccggccggaccggcagcaacaacgtgtacatgcacaactaccagttcgccgtggacaagacccacgtggagtacatccacaacatcgagaagtacgtgacccggtacgagaccaagaagccgcccgtggtggtgagcgtgtacgacaagatcagcaccaagggcaacatcgacctgtacgactggctgtgcgagcggatgcggatgaacccctacaagcagctgttcaaggggctgctgaaggacctggaggccgggcacgagaagttcaacgcgctggacgtgctggcccagtgcaagatcatcctggagatcctgaagagcttcaagtgcgaccggcagatcaccaacatcaaggagctgaacggcaagggcaccgccgggatcctgaagaaggcctccaacatcagctccttcaacaaggtgaacgtgatcgtgcagtccgtgaccgggctgtacgagtacaagcggaagatcctgggg

SEQ ID NO: 214 - DNA, 4053 bp, synthetic construct
  source 1..4053: mol_type = other DNA
atgggcaagtactacctgggcctggacatggggaccaactccatcggctgggccgtgaccgacgagaactacaacctgatccggaagaagggcaaggacctgtggggcgtgcggctgttccccgaggccaagaccgcccaggagcggcggtccaagcgctgcgagcggcggcgccggcagcgcgagaaggcccggatcggctgcctgcaggagatgttcgccgacgccatcaacgagaaggaccccggcttctaccagcggctggaggacagccggttcctgatcgaggacaagcgcgagcaccagcccttcgtgctgttcgccgaccgggacttcaccgacaaggactactacgccaagtaccccaccatctaccacctgcggaaggagctgctgcagtccaaggagccccacgacgtccggctggtgtacctggccgtgctgaacatgtacaagcaccggggccacttcctgaacaccaccctgaccggcggggactccaccgacgagttcgagtccctgtacaagtccctggtggagaagatgggccgggtgcgcgaggaggagggcgtggacgacttcctgtgcgtggacctgaagaacgtgctgaccgacaagcggttctccaagtcccgcaaggtggaggtcatccgcgaggtcctgaagatcgacaagaaggacaagatcaagaccgacatgtggaagctcatctgcggcctgcaggtggccctggccaacatcttccccgaggagtccatgtccgacgagttcaagaagtacaagctgtccttcgacgacagcgggtgcgaggagaagatgctggaggtggaggggatgatcagcgaggaggccttcgacgccctgctgatcatgaagcagatccacgactgcatcatcctggccgacatcatggccggcgggaacaagaagtaccacttcctgtccgaggcccgggtggccagctacgagaagcacaagaaggacctgaagctgctgaagaagatctacaaggtctacctgcccgagaagtacgacgagatgttccgcaagaccgagaaggacaactactgcgcctacatcggcagcagcaacgtgaacgggaaggtgcggcggcggaacgagcactgcaagatcgaggagctctacgcccggatcaagaaggagaccgggtccatcgccgccaacagcgacgtggcctacatcctggaggagatcgagaagggcaccttcctgctgaagcagatgaccgccctgaacggggtgatccccaaccagatccaccgggccgagctggagcagatcctgaagaacgccgccgagtacctgcccttcctgaacgagaccgacaaggacgggatgaccgtgagcgacaagatcatcgccctgttcaagttccagatcccgtactacatcgggcccctgatcaagaccgagaagaacaacgcctgggtggtgcggaaggaggacgggaaggtctacccctggaacctggagcagaagatcgacgtgaagatgaccgccgaggagttcatcgggcggatggtgaaccactgcacctacctcagcggcgagaaggtcctgcccaagaacagcctgctgtacgagcgcttcatggtgctgaacgagctgaacaacctgaagatcaacgggcagaagatcagcgccgagctgaagcaggagctgtacaaggagctgttcgggaacgggaagaaggtgaccggcaagcggatcaagacctacctgttctcccacgggtacgtgtccagcgacatgcccgtggagatcaccgggatcgacggcgactgcatcaaccggctgagcaactacaagaagttcctggaggtgttcaagaccgagaccctgacctacgagcaggagaagatcgccgaggacatcatcctgtgggggaccctgtacggcgactccaagcacttctggaaggagaagatcgaggagaagtacggggagatcctgacccccgagcagaagaagcggatcctgggctaccggttccgcgactggagccggctgtcccgggagttcctctgcctggagggcgagtccaagcagaccggcgagaccgcctccatcatcagccggctgtggaacgagaactacaacctgatgcagctgctgggcgacgagttcacctacaagaacgtgatcgaggagcgcaccaaccagatcaacaaggtgctctccgagatccagtacgaggacctgatggagctgtacatcagcgcccccgtgcgccggatgacctggcagaccatcctgatcctgaaggagctgcagaaggtgctgggccggtaccccgacaagatcttcgtggagatggcccgggagcaccggaaggagtccggccggaccgtgtccaagaagcgcaagttcgaggagctgtacaagaagtgcggcgaggaggccgagcagtggctgcgggagatcgaggtgaccgacgagtaccggttccggagcaagaagctctacctgtactacacccagaagggccggtgcatgtacaccggcgagcggatcgagctgagcgagctgttcaacgacaaccggtacgacatcgaccacatctacccccggcacttcgtgaaggacgacaacatcgacaacaacctggtgctggtgaagaaggagaagaacgcccacaagtccgactccttccccatcgagtccgggatccagaagaaccagctgacctggtggaacctgctgctggagggcgggttcatcaccaaggagaagtacaaccggctgacccggaaggaggagttcaccatcgaggagcagaccgccttcatcagccggcagatcgtggagacccggcagggcaccaagaccatcgtggacgtgctgaagaagtcctgccccgagaccgacatcgtgtacgtgaaggccgggaacgtgtccgacttccggaaccacttccacgtgatcaagtgccggagcatcaacgacttccaccacgcccacgacgcctacctgaacgtggtggtgggcaacgtgtacgacgtgaagttcacccggagccccaagaacttcgtggaggcctaccggcgggaccccgtgcacaacccctaccacatggacaagatcttcgacttcaacgtgaagcgggggtccgtgaccgcctgggacaccaagaagtccatccggaccgtgcggtccgtgctggacaagaacagccccctggtgacctacatgaactacgaggtgcacggggagctggccgaccagaacccctacagcgcctccaaggccgccaaggtccagggggaggggtacatccccctcaagaccagcgactcccggctggccaacgtgcagtgctacgggggcttcaccaagtacaccggcacgtacttcttcgtggtggagcacaccgtgaagaagaaaaccgtgcggaccctggaggccatgcccctgtacctgaaggccaacatgaacaagatcgacgagatcgagaagtactgccggaaccagctgaagtacatcgagccccagatcgtctgcagccggatcaagatgtacagcctgatgaagatcgacggctactacgcctacatctccggccgcaccggcaaccagatcctgctggtgaacgccatccagctggtgctgaagcgggagtaccaggactacatcaagaagctggacgacatcttcgagaagggcctggacaactccgccctggagtaccagaaaaccatcaccaaggagaagaaccaggagctctaccgggagctcctgtacaagcacaaggatggcatctacggccggaagcccaaccccgtgggcgagaagctggagaagggcaaggccgtgttcaagaacctgagcatcatggagcaggccacgatgctgcgggagatcctgaagctgagccagcgcctgaacgagggcgccaacctggccctgttcggcgagggcaagaagtgcgggatcaccaagatgaacaaggagatcaccggcctgaaggagtgcaaggtgatccaccagtccgtcaccgggctgtacgtcaccgagaccgacctgctcaacatc

SEQ ID NO: 215 - DNA, 3999 bp, synthetic construct
  source 1..3999: mol_type = other DNA
atggccaagaaggactactccatcggcctggacatcggcaccagctccgtgggctgggccgtgatcgactgccagaactacaaggtgctgcgcaagggcaaccagaagctctggggcgtgcgcctgttcgacgaggccaccaccgccgagacccggcggctggcccggggcacccgccggcggtacgaccgccggcggacccggatcaagctcctgcaggaggagttccagaacgagatcaacaaggtggactccaacttcttcaagaagctgaaggagtccgcctaccacgaggacgacaagctgaacaagaccatcatcctctcccaggaggagaagaacaagatcaagaagtacaacgacctgtaccccaccatctaccacctgcggcacaagctgatctcctccgaggagaagatggacatccggctggtgtacctcgccatccaccacatcatcaagtaccggggcaacttcctgtacggcgcctccaacttcaacaccctgaacctgaacatggaggagctgttcgacaacctgctgaaggacctgaacgagatcacgtccatcgaaaagaccgaggacctgagcctcgtgaacgccaagaagctggaggagttcctgtccctggagtccaagaacgacaagaagctggagctgaccaaggagttctcccaggccatctccaagaagcagaccgccgagctggtgaagctgctgatcggggacaagtccaacctgaacgtgctgttcaacaccgagtccgaggaggagatcaaggtgtccttcaagggctcggagtacgaggacaacgaggacaagatcatcaagaacttccccaacgagatcgacatcatcgaggacgtgaagaacatctacaacgcccagttcctgctgaacctgttcaaggggcggaaggagcagaacctgtcctacgtgatggtggacaactacaacatccacaagaaggacctgcagaccctgaagcagatctacaaggccgacaagaacctctacaagaagatgttcaagaacgagaactgcatctacgagaagtacatcaccaacaacatgacctacgacgacttcaagaaggagatcatcaagtccctggagatcctgaaccccatcaacaaggaggacctgctggagaagctggagaaggagaacttcatgccccggatcaccagcgtggacaacggcaagtacccctaccagctgaacgagtccgagctgatcgagatcatcaagaaccaggggcagtactaccccttcctgctggacaagaccgaggacgagaagtacaagctggtgaagatcctggagttccggatcccctactacgtggggcccctgaacaacaccaccagcaagaagggggtggagaacaagaactcctggctggtgaagaagaaggacaacgtgaagatcaccccctacaacttcaacgaggtgatcgacctcgagtccagcgccgagaagttcatcaagcgcatgctgggcacctgcacctacctgctgaaggagcccagcatgcccaacaacagcatcctgtacagcaagttcaaggtgctgaacgagctgaagcagatcaaggtgggcgacgagaacaaggagcagaagctgtcccgggagatgatcaacaagatctacaacgacctgttcctgaccaccaagggctccatcaccgacaagaagttcaaggagtacctgatgcagaccggggagtacacgatgtactccaacctgtctgtgaccgggtactccgcggacaagaagatcgccaacaacatgtccagctacctggacttcttcggcgagaacggcatcttcaccaacaccaactacagcgtggaggacgccgagaagatcatcgagtacatcaccatcttcgaggacaaggagatcctgaagcgcaaggtgatcaacgagttccccacgctgaacgaggagcagatcaagaagatctgccgcctcaagtacaaggggtggagcaacctgagcaagaagctgctgaccgaggtgtactacatcgacgagaaaacctcggtgcccaagaacatcatcaccctgatggaggagacctcccagaacttcatgcagatcatcaccgacaagaagtacaacttcgaggagaagatcaacgagatcaacaactccaagaacagcaagaagctgtcctacgagctggtggacgagctggccaccagccccaagaacaagcggggcatctaccaggccctgaaggtgctgaacgagatcatccagtacatgggctacgagcccaagcggatcaccctggagatggcccgcggggaggaggagaacaagcggaccgtggaccgcaagaaggtgatcgagaacgcctacgccggcaacagcgaggagatctacaactactccaagctgaagaaggagctgggggagatcgagaagatcgagtcccacaaccagaagctgttcctgtacttcctgcaggaggggaagtccctgtacagcgggacccctctgaacatcgaggagctggagaagtacgagatcgaccacatcatcccccggaccctgatcaaggacaactccatcgacaacctggccctggtgacccgggaggagaaccagaacaagagcgccagcttcgtgctgcccgagaactaccggaccagcaagatgaaggtgtggtggaaccacctgaagaagctgaagctgatctcggacaagaagtacaacaacctgatccgggacaagttcagccaggagaccatcgaggggttcatcaaccggcagctggtggagacccgccagatctgcaagcacgtggccaacatcatcaagaacatgtacgaaaagaccgagatctactacatcccggccaacctgtccagcaactaccgggagaagttcgagctgtacaagttccgggagatcaacgactaccaccacgcccacgacgcctacctggccgccaccctgggcgagtaccggacctacctgaagtccaacatctcctacgactacctgaagcggatcaacttcaagtcgtaccaggagaagaagtaccaggagctgaacgccgggtacgtgatcaacagcctggtgaacgccgacaactacaccgagctgttctgcgaccccaacaccggcgagctcctgttcgacgccaaggagttcaacaaggccatcgagaacaccctgtaccagaacgacatcctggtgtccaagaaggtggagttcaagaccggggagctgtggcagcagaccaagaacaagaagggcgagaagggcgtgcccctgaagcggaacatgcccaccgagaagtacggcgcctacacctccatcagccccgcctacgccgccgtggtgaagttcgtgaagaacaacaaggaggaccagcggatgatcggcatccccatctacatcgacatcaccagcaaggagaacaagaacatcaagatcgagtacatcaagaacctgctgaacgccgatgaggtggagatcatcaaggacaagatccccttctactccaagctgaactggaacggggccatctgctccctggtgggggccaccgacaaggtggaggtgtgcaacgccaaggagttcaacatcgacaagaagcacatgatcaagtggaagctgaccctggtgcggctgttcaacggcaagaaggagatcatcgacaacgccacctacaacgagaacctcgaggagatcatcgagtacatcgtgtccaagatcgagaaggagtacatcctgtaccagaacctgctggaccagatgaaggagatgttcaagatcaactccaccgagaagctgaaccccgaggacaaggagaaggtgatcctcgagatgttcaagctgctcaagtgcaacagcgcctgcgccaacttcaagttcctgaacgagagcatcgccttcgggaagaagaacgggcgcatcatcaacgacggcatcatcatcaaccagagcgccaccggcctctgggagaactactacgagttc

SEQ ID NO: 216 - DNA, 4140 bp, synthetic construct
  source 1..4140: mol_type = other DNA
atgaacctgcggaacaccaagaactacaacatcgggctggacctggggaccagctcggtggggtgggccgtgaccgacgacaccggcgccctgctgcacttcaagggccgccccacctggggcagccggctgttcagcgagggcaagaccgccagcgagacccggatcgcccggggccagcgccggcggtacgaccgccggcggcagcggctggacctgctgcagaccttcttctacgacgagatggagaagatcgacagcgagttcttcctgcggctgcggcaggcccggctgttccccgaggaccgggaccccagccacgccgactaccgctggcccctgttcaacgagagcaacttcaccgagaaggactactacaagcggttccccaccatctaccacctgcggaagcacctgatggagtccgacgagaaggccgacatccggctgatctacctggccttccacaacatcgtgaaggtgcggggcaacttcctgcaccaggacaaccccaacctgtccgccaagaacgccaacatgaaggccagcatcgaccggctgtccgaggtgctccgcgcctggtacgatgagcgggaggtggcctgcgagttcacgccccgggacatcctggccatcctggaggaccaggccgccgacagcttccggagcgtgaagcgggacgccctgaagaacgccttcaccttcgacggcgaccacggcaagatcgccagcgagctggggaaggccttcgtgggctacaaggccgacttcgcctccatcttcctgctggagagcgagaaggcctccttcagcctgtccaacgacgaggccgtggacgagttcatcagcagccagtgccccgacgagggcgccgacctgttcgaggccctgcgggccgtgcacagcgccttcgtgctgagcggcatcctgcggggcgggaacggggagaccatctccttctgcaaggtgaacgactacgagcggtacggcaacgacctgaagctgctgaagcagctgacccgggagtacgcccccgagaagtacgcccggttcttctgcggcacccactacgacgcccccttccacaagaactacgacgcctcccaggccgaggggtacaccaagtacaacctcggccagaagaagagcgagtacaagagctcctccatgacctacgacgacttcaagaaggccgtggagaagctcttcaaggggacccccgccgagtccgacgaccggtacaaggagatgatgcaggggttcgacgaggggaccttcctgcggcggctcaagacctccgacaacggcagcatcccctaccagctgcacctggaggagatgaccgccatcatcgccaagcaggcccctcactaccccttcctggccgagaaccagcagaagatcgagtccctggtgtccttccgcatcccctactacgtggggcccctgaccaccaagaacgccgccgtggacgggaaccagaacctgcggttcgcctgggccaagcggctgcccggcaaggagggggagcggatccggccctggaactgggaccagatcatcgaccgcaccgagagcgcccagcgcttcatcgagcggatgacggggacctgcacctacctgcacggggagcccgtgctccccaagtgcagcctgctgtacgagaagttctgcgtgctgaacgagctgaacggcagccggtggtcccaggacggggacgacgagaagcggttcagcgccgacgaccggtccaagatcttcgagctgttcaagcacggcagcgtgagctacgagaaggtgcagggctggctgcggcagaacaaccgcctgaacccccacgtgatgggcgggcagggggagaccaagtacgagagcaagctcagcagccacatgttcttctgccggctgctgaacgtggacgacctggacgccacggccagcgccatggcggaggagatcatcctgtggaacaccctgttcgaggaccgcaagatcctgaaggagcggatcgagcagacctacgggggccagctgaacagcgcccagatcaaggccatctgcaagaagcggttcaccggctggggccggctgagcaagaagctgctgtgcgagctgaaggtgcccaccgactccgggctgaagtccatcatggacatcctggaggaggggaacccctccaacgggcacctggggcgcgccatggtgctgatggaggtgctgcgggacgaccggctgaagttcgagcaggccatcgacgccgccaacaaggaggccctgcagagcgggggcgggctgaaggtggaggacctgcccggctcccccgctctgcggcggaccatcaaccaggcggtgcgggtggtggaggagatcgcctccatcaccaagaaggtgcccgccaacatcttcatcgaggtgacccgcgaggacgacgggaagaagaagggcaagcgcaccacccggcgctacgacaccatcaagcaggccctgaagagcctgcgcgccgagggggaggacaagcccgagatcctgtccgagctgggccggcggaagccggacgagctggacgagaagctgaccctgtacttcatgcagaacggcaagagcctgtacagcggcgagcccctgcggatcgagtgcctgtccgagtaccaggtggaccacatcatcccccagtcctactacaaggacgacagcttcgagaacaaggccctggtgctgcccggggagaaccagcggaagtccaacgccctgctggtggagcagtccatccggacccggatggagcccttctggcggaccctgcggaaccacgagctgatcggggagaagaagtaccgcaacctgatgcgggaccgggtggacgagaaccagatgaagggcttcatcaaccggcagctcgtggagacctcccagatcgtgaagttcacccagatgatcctgtccgaccggttccccgagaccaagatcatccccgtgaaggccgccctgagcagccaggtgcggtccgcctgcgggttcgtgaagtgccgggaggccaacgactaccaccacgcccacgacgcctacctggcctgcgagatcggccggttcatccagctgcggcaccccgacatctacgacaaccccatcgcctacacccggatgatgcgggacttcgtgcgcgcccgctccgaggagctgaagcggaccggccggatgcccggggacgccaccttcctggtgcagagcttcctgcggtccgggttcaaccgggagaccggggagatcttcaaggacgcctgggacgccgaggccgagatcgcccggatccggcggttcctgaactacaaggactgctacatctcccggatgcccgagatccacaccggcgccttctgggggcagaccatctacagcccccacagcaacgagaccaagctgctgtccctgaagaaggggctgaacaccgagaagtacggcggctacagcaacaaggccttcgcctacttcttcatctacagcggcgtgaagggccggagcaagaagtacgccatcgccgggctgcccatctacctggccaagaccgtggccgaggacgagggcaacctgctgcagtacgcccaggccctgggcgccgagaaggaggtgtccgacatcgagatcgtggccagccccatcctgtacaaccaggtggtgcggtaccagaaggacgagttccggatcagcgccgaggacgtggtgtactccaaccggcagctgttcctgcccaccgcctacagcaagcacctggccgccctcggggacaacgccatctccgagggcgacggcccgctgtacgacgagctgtacagcgtgatcatcgacaagatggacgtgctgtgcaccaggttcgagcggatcaagcagaccctggtgaacggcaagaacgagttcctgaacttcgaggtgtccgagaagaaggagttcatcaagcagctgtgcgccttctgcaacggcggcaccgagcgccggaagaaggcgcgcatcaacatcagccggttcgggggcagccccaacgccggcgggatgggcaacgggttcatcctgagctccatcagcgagctcgagatcatcgaccagtccgtcaccgggatgttcgagtcccggcggcggctggagctc

SEQ ID NO: 217 - DNA, 4071 bp, synthetic construct
  source 1..4071: mol_type = other DNA
gtgaacatgaacagcaccgactactacatcgggctggactgcggcacctccagcgtgggcttcgccgtgaccgacgtggactacagcatcctgaagttcaacggcaaggccatgtgggggagccacctgttcgaggaggccaagaccgcccaggagcggcggggcgcccgctgcgcccgccggcggctgcagcggcggaagcagcggaccgccctgctgcaggagatcttcgccgaggagatctacaaggtggaccccaccttcttcatccggctgaacgactcccagtacctggaggaggacaagcggatccccgggcggaacatcatcttcaacgacaaggacttcaaggacaaggactacttccggaagtaccccaccgcctaccacctccgcaagaccctgatggaggagaaggtggcggacccccggctgctgtacctggggatcaaccacatcctcaagcaccgggggcacttcctgttccccggggacaacctgaaggccgtgtccgacatcagccccgtgctggacagcatcgccgaggcctacaacgacatcttcggcgagcagctgtccttctcctccaacgaggacatcgagaaggccctgctgaacaagtccagcatctccaagaaggaggggctggagtcgggcatcagcctgcacgacaccaagaagaaggccctgctggtcaaggccatcctggggtacaacaccaagccccaccagctgttcgacaacgaggagtacaaggagtgccccgccatcgagttcaagaagctgtccttcgaggagaaggacctccccgagatcgaggagaccgtgagcgacgacgagtacaagctgatcctgaacctgaaggccctgttcgactggggcctcctggcccggatcatgcagggcaacaagtccatctccgaggccaaggtctgcctcttcgagaagaacaaggacgacctgaagatcctgaaggaggccatcaagacctacgccaagtccgagtacgacgacttcttccacagcatggacaacgggaagttcagcagctacatcgggaagaaccacgacaagcggaaggggaaggaggggcgctgcaagaagagcagcgtggacgacttctacaagaccgtgaagaagatcctggggaacgcccccaaggaggacgccggggtgaagcacgtgctgaactccatcgaggaggacagcttcctgcccctgctgtcctcctaccggaacggcgtgatcccctaccaggtgaacaaggccgagctggagtccatcctggacaacgccagcaagtacttcgacttcctgagccggaaggacgaggacgggctgagcccccgggacaagatcctgtccatcctgacctaccgcatcccctacttcgtggggcccctgggcagcaacgccgacagcgacgcccacgggtggctggtgcggaaggagaagatcggcaggatcctgccctggaacatcgagcagaaggtggactacgaggagtccgccgagcgcttcatcaagcgcatgaccaacaagtgcacctactgcaagaccgaggacgtgctgcccaagaacagcctgtcctacagcaagttcatggtgctgaacgagctgaacaacgtgcgcctgaacggcgagcgcctgtccgtggagcgcaagcagtccgtgttcaacgagctgttcaagaagcgcaagaaggtgaccaagaagcaggtggtgaaccacgccatcaaggaggggtggtacggcaaggacgacctgtccgtggacgggatcaccggcatcgacgaggacttcaaggcctccctgggcccctacgccgacttccgctcctggatcgagcagggcaagctgaaggccgacgacgtcgacgagatcatcaagtggatcaccatcttcagcgagggcggcgacatcctgaagaacaggatcaagaagttctacggcgatgtgctgaacgacaacgacatcaacgccatcaccaagctgaagtacgccgggtgggggcggttcagccacaagtttctgtacgagatccagggcatgaacaaggagaccggggagctgatgagcatcatgcggatgctctggcacacccagcacaacctgatggagctgctggggaacgactacgagttcatcgagcaggtggacaagccccagatcctggggaagctggactacgacgtggtggacgacctccacgtctcccccgccgtgaagcggcagatctggcagaccctgcggatcgtggacgagctgcggcggatcatgaagcacgacccccgcaaggtgttcatcgaggtgacgcggtccgagcaggagaagaagcggaccgtgtcccggaagaaggacctgatcgacaagctgaaggaggccgagaagggcggcctcggcttcggcatcgaggtccagaagctgatctccagcctggagggcaaggacgagagcgccgtgtcccgccaggacaagctgtacctgtactacagccagtgcggcaagtgcatgtacaccaacgagcccatcgacctggacgacctgtacaacaccgagctgtacgacgtggaccacatctacccgtacagcaagaccgacgacgacagcctgaagaaccgggtgctggtgctgaagaaggccaacctgcgcaagagcgacagctaccccatcgacgacagcatccgccacaagatggccagcttctggaagatgctgtccgacaaggggttcatccccaaggagaagtacgagcgcctgatccgcaccagccccctgtccgaggaggagatgaagggcttcatcaaccgccagctggtggagaccagccagaacgtgaaggccaccgccgccatcctgaagagcttcttcggggaggggaccaagatcgtgtacagcaaggccgggaaggtgagcgacttccgggaccagttcgacctggtgaagtgccggtccctgaacgagctgcaccacgccaaggacgcctacctgaacatcgtggtgggcaacgtgctggacaccaagtacacctccgagttctacaagcacgccgacgggcggggctacggcaacgtggcccggcccttcgacttcgacgtgaagggcgcctggctgcggggcagcgggggcaccatcgccaaggtgcgggacatcctgaacaagaacaacatcctgttcacccggcagcccgtggcccgcaccggcgccctgttcgacctgcagatcgtgcccaagggctccaagaagggggccctgcccgtgaagccctccgagccccggctgaaggagaagctgcaggggctggacgacgccacgggcatctacgacgagtggacctccaagtacgggggctacaacagcatgtccaccagctacttcgccctggtgaagcacgccgacaagaagcggagctacgccagcttcgtgcccatcgccatgatcgacgccaagcggctgagcgagcccgagcagctgctggcccactgccgcaacgtgctgcggctggagaaccccgtgatcgtgaacccccggctgctgatgaacacgcagctggagatcgatgggtaccggttcagcatcaccgggaagagcagcgggggcaaggtgatcaccctggtgtccagcatcccgctgatcatctcccaggagtcccagaaaaccctgaagaagatcgagaagttcttcaaccggaagaagatctacaaggacatcgagatcgactccaagcgggacgggatcaccgaggacaacgccgccgccctgtaccaggagctggtgaacaagtccagctacggcatctacaacaagaagccgagcaaccagtccgacctgctcaagaactcctacgaggtgttcgagagcctcgggctgctgaacaagtgcaacgtgatcaacgagctggtgaactacttcgccatgggggtcggcaaggccgacctgaccctgatcaacggcaccaaggcctgcggcgtgctgaccaagggcgccatgatcgacctgggcaagaccgacctgtgcatcatctaccagagcatcaccgggctgttcgagacccgggagcagatcaaggcc

SEQ ID NO: 218 - DNA, 4119 bp, synthetic construct
  source 1..4119: mol_type = other DNA
atggagaaggaggactacttcctggggctggacctggggaccagctccgtgggctgggccgtgaccgacacccagtaccacctgaagcgcgccaagggcaaggacctgtggggcgtgcgcctcttcaacgaggcctccaccgccgccgagcggcggatcaagcggaccagccggcggcggatcgagcgggagaaggcccgcaaggccgtgctgaaggacttcttcgccgacgccatcaacgaggtggacgccggcttctacctgcggatggaggagtccttcctgaagttcaacgagaagcggaacgaccgctccgagggcaaccagcagcccttctccctgttcaacgacaaggacttcaccgacaaggacttctacgagaagtacaagaccatcttccacctgcggaaggagctgctgcacagcatcgagccgcacgacgtgcggctggtcttcctggccatctacaacatgttcggccaccgcgggcacttcctgaactccacgctcgatcccaccaagagcgagtccaagatcgacatcgcctaccaggagatggtggaggccctgaagctggtcaacgtgaacatcctggagagcatcgactacgacaagttcgagaagatcctctccgggcgcgggaagtcccgctcccgcatctgcgaggagctgggggacttcttcgccatcgagaagaaggacaaggtgcgctacagcatcctgaagatgctgagcggcctgaaggtccccgtgaaggagttctacaacaacaacaacgaggacctggacgaggagtcccagaagaagtccgtcagcttccgcgaggagaacttcgaggagaccttcgacgagatccacaccatcgtgggcgacgagtggttcaacgccctggagaacatcaagaccgtgcacgacatcggcatgatcgccaacatcatgcacgggcacatcttcctgtccgacgcccgcgtggagatctacgagaagcaccagcaggacctgaagcagctgaagagcctgctgaaggagtacaacatgaagggctacgagtccttcttccggaccatcgacaagggcaactacagcgcctacgtcgggtccgtgtactcccacggcaagctgctgcggcggaaggccgacggccgcaagaaggaggacctgtacaagaccatcaagggcctgatcaaggggatccccgacgacaacgccgacaagaaggacatcctggagaagatcgacagcgagtccttcctggagaagcagctgaccggcagcaacggcgtgatccccaaccaggtgcacagccgggagctgcggcagatcctgaagaacgccgagagctacctggacttcctgaagaacaaggacgagaagggcctctccatctccgacaagatcatccagctgttcgagttccagatcccctactacgtggggcccctgggcatggagttcaacggcaagaagggctacaactgctgggccgtgcccaaggagaaggacaagaagatcggcaagatctacccctggaacttctacgagaagatcgacgaggccgccagccgcaaggagttcatcgagcggatggtgcgcaagtgcacctacctgaacgacaaggtgaccctgcccaagaagtccctgctgtacgagaagttcatggtgctgaacgagatcaacaccatcaaggtgaacggcaagcggctgaccaccgagctgaagcagggcatcttcaaggagctgttcgggaagggcaagaaggtgtccaagaagcgcatcaaggagtacctggtgagccggaacgccatggaggagaagtgggagatcgaggggatcgacaaggactgcaaccagtccctgacctccatcggcaagttctacggggtgttcggcgaggaggtgtacaacgacgacaacaaggccctgatcgaggacatcatctactggggcaccctgttctccggcgacaagaagttcatcaagagcaagatcgaggagaactacggcaaccggctgaacgaggagcagctgaagcgcatcctgggcttcaagttcgagggctggggcaagctgtcccgggacttcctcgagctgcagggcatctccaaggagaccggggaggtgaacagcatcatcaacttcctctgggagaaccaggtgaacctgatggagctgctcagcgacgagtacaccttcaccgacgagctgaacaagaagatcatcagctccgagaagcccctgtgccagtggaagatcgaggacctggacgacatgtacatctccgcccccgtgaagcggatgatctggcagacgatgaagatcgtggacgagctgcagaccgtgctgggctacccgcccaagcggatcttcgtggagatgacccgctccgacgaggagaaggtgcggaccgtgtcccggaaggagaagctggccaagctctacaagaagatcgaggaggagcagtccgtgtggaacaaggagctggagctgaaggacgagtcctacttcaagtcccgcaagctgtacctgtactacctgcagatggggaagtgcatgtacagcggcgagcccatcgacctgagccagctgatgaacgacaacatctacgacctggaccacatctacccccagcactacaccaaggacgactccctggagaacaacatggtgctggtgaccaaggaggagaacatgaagaagggcgacaagcccatcccccgggaggtccaggacaagatgtacaagttctggctggagctgaaggacaaggagttcatcaccgacgagaagttctcccggctgacccggcggaacaaggagttcacccgggaggagaaggtgggcttcatcaaccgccagatcgtggagaccggccaggccaccaaggtgatcacccagatcctgcagcagtccatgggggacgagtgcaagatcgtgttcagcaaggcccggctggtgtccgacttccggaagaagttcaagatccccaagagccggatcatcaacgatctgcaccacgccaacgacgcctacctgaacatcgtggtgggcaacgcctactacgtgaagttcaccaacaaccccatgaacttcatcaagcagagcgagaagaaccccgactccgaggagtacaagtaccacttcgggcggttcttcgagcaggacgtgaagaacaagaacgagaccgcctggatcgccaaggactccgggtgcaccatcgtgaccgtgaaggacaccctgcggcggaacaccccgctggtgacctacaaggtcgaggaggggcacggccagtacttcaaggagacggtctacggcaccgacaaggccaaggccaacagctacatcggcatcaagaccaaggacagccccctgaacgacgtggccgagtacggcggcaagaccgacgtggccaccctggggtactgcctggtggagtaccggaagaagaacaagatcatccggaccctggaggagctgcccgtgttcctgggcgagtcccgctccctgaaggacgagaacgtcctgaactacctgcgggagaagttcatcaaggagggcaaccccgaggccgccgagagcctgaacctgatcgagcggttcatccccaagcagagcctgatcaagcgggagggctactactactacctgggcggccggaccaacgtgcaggtgtacctgtacaacgccatgcagctgaagctgcccctgaacctggtgaagtacatcaagaagatcgagaaggccaactccaagtccgactactccgagatcgacaaccagggggagcccgtgatcaccgtggagaagaaccaggagctgtacaagatcctgatgtccaagttcaaggaggacccctacaagaaccgggtgaacccgatcaacaaggtgctggagaacggcctgaacaccttcatggacatcgagatcgccaaccagtgcaagatcatcgaggtgatcatcctgaacatctccaagagcaacacgatgaacctgaagggcatcggggaggcctccagcgccggcatgtgcctggggtccatggacatctccaagctgaaggagttcaagatcatccaccagtccgtgaccgggctgttcgagatcgagaaggacctcctgaag

SEQ ID NO: 219 - DNA, 3309 bp, synthetic construct
  source 1..3309: mol_type = other DNA
atggagatccgcttcgccctggacatcggggtggccagcgtgggctgggccgtggtgaacgacacctacgaggtgctggaggccggcgccaacatcttcccctgcgccgactccagcaagaacgccgaccgccggggcttccgccagctgaagcggatccaccggcggaagcacacccggatccgggacttcgagatcctgtgggagcggcaggggtggaacatggagaagatcatcatctccgaggtgctgcccctgcgggtgaagggcctgaaggaggagctctccgagaacgagctgtacaacgtgctgcggaacgagctcctccaccgggggatctcctacctggaggacgccatcgacgacaccgtctccgggagcctgtacgagaaggccatcaagaacaaccagcggcagctggagaaggagagcttcccctgcgtgatccagtgggagcggctgaagaagtacgggaagtaccggggcaaccagtccgtgaacatcgagggcaaggagatcaacctgtccaacgtgttcaccaccgcctcctacgagaaggagatcgagaagatcctgaacacgcagaagaagttccactccatcctgtccgacgagttctgccagcagtacatcgacatcttccgccggaagcggaagtactacgagggccccgggaaggagaactcccggaccgactacgggatctacaccacccagaaggaccagaacaccggggagtacctgacctacaacaacctgttcgagcggctgatcggcaagtgctccgtgtaccccgaggagtaccgggccgccggggccagctacaccgcccaggagttcaacctgctgaacgacctgaacaacctgaccgtgaacaaccggaagctgatcaagaaggagaaggaggagatcgtggaggccatcaagacctccaaccggatcgacgtgaagaagatcatcgagaacgccatccacgagaagatcgactccctgaccggcatgctgctcgacgacaagggcaaggagtgcatgcacaagttcgagcagtacaacctggtgcggcggaacttcgagaagaacggcctggacttcgagaagatcacccgcaccgaccacgacctgatcggggagatcctgaccctgaacagcgactacggctccatcctggagtccatccgggacaagttcccggacctgtccgagaaggaggtgaaggtgctgtacgagatcaagcggaagaacggctccctgttcagcaagtggcagaagctgagcctgaaggccatgaacgagctgatccccgacatgtacgacgagtccaagaaccagatggtgctgctgaccgagcggaagctgatcaagaccaaccggaagcagtgcatggagtccaagtacatcaactgcaacatcgccgtggcccagatctacaaccccgtggtggtgcggagcatccgcatcgccgtgcggatcgtgaacgccctgctgaagaagtacggcaaccccaagcagatcatcgtggagatgccccgggacaagaacgacgacgagcagcggaagaagctggacgacatgcgcaaggccaacgagcgggagctgaacgccatcatcaaggagatcaaggagcagtacggggagaacatcagcgacgagaacttctactaccagaaggagctggccctcaagctcaagctgtggcgcgagcaggacgagaagtgcgtgtactccggcaagcagatctccatcaaggacctgctgtacaacccccagctgttccagatcgaccacatcatcccgatctccatcagcttcgacgacagccggaacaacaaggtgctggtgtacgacatcgagaaccagaagaaggggaacaagaccccctacatgtacctgtcccagctgtcccggcactgggacttcgagcagttcaaggcctacgtgaaggagctgtacgcccggaagaagatccagcggaagaagctggagaacctgctgtacatgcaggacgtcaccaagtacgacgtcctgaagaagttcatcaaccggaacatcaacgacacccggtacgccagccgggtgatcctgaacctgctgcaggactacttcaacgcctaccagatcagcaccaccgtgcgcgtgatccgggggtccttcacccaccagatgcgcaaggtgctgcggatcgagaaggaccgggaggagtcctacgaccaccacgccatcgacgccatcctgatgtgctacagccagatggggtacgacctgttctacaagaagcagtccgagttcatcgactgggagaccggggagatcgtggacgagctggcctgggacaagctgatggacagcgagaagtaccaggagatcatgtaccagagcaagtacatgaagctgcggaagaacatcgccgagggcaaggagaagatcaagtactggcacaaggtggacaccaagcccaaccgcagcctgtgcaaccagaccatccggggcacccggaagcgggagggcaaggtgtggaagatcaacaagctgaacatctacgaccagaacgacgtcaagaccctgcggaacaagatcgagaagggcaagtcctccaccttcctgatgtaccagtacgaccgcaagtcctgggaccagatgatcgagatcctggacctgtaccgggactccaagacccccttctccgactacgagaaggagaccggcgacttcttccgcaagtacagcaagtcccacaacggccccgtgatcaccaagatcaagtaccaggacggggagctggggagctgcatcgacatcagccacaagtacgggctgaagaagggcagcaagaaggtggtgctggagtccctgaccccctaccggatggacgtgtactaccagtccatgaccggcaagtactacctggtgggcctcaagcactccgacctgaagttcgagaagggccagtacaagctgaacgaggaggcctacaacaaggccctggtggccgagaaggtgatccccgagggcaagtcccggaacgacctgggcatgatggggatcgagttctgctggtccttctaccggggcgacgtgatcgagtacgagaagaacggcgagatcaagcgggagctgttctggtcccgcacgatgcccaagaactcgaactacatcgagaccaagcccatctccgccggcaagtggaagggcaagaagcagaacttcgtgggcctcgccaagaccaagtacatcaagaagatcaggtccgacatcctgggcaaccagtacgtgtgcaacaaggagaagttcatcatggaggtggacaagtcc

SEQ ID NO: 220 - DNA, 4062 bp, synthetic construct
  source 1..4062: mol_type = other DNA
atggagcggtactacctgggcctggacatgggcaccagctccgtgggctgggccgtgaccgacgagaagtaccagatcgtgcggaagaagggcaaggacctgtggggcgtgcgcctgttccccgaggcccagaccgccgccgagcgccggaccaaccgggtggcccggcgccggcggcagcgggagaaggcccgcatcggctacctgcgggagctgttcgccaacgagatccagaaaaccgaccccggcttcttccagcggctggacgacagcaagtacttccaggaggacaagatgatccaccagcccttcgccctgttcgccgacagcggctacaccgacaaggagtacttccaggagtaccccaccatctaccacctccggaaggagctgctgaccagcaccgagccgcacgacgtgcggctggtgtacctggccgtgctgaacatgttcaagcaccggggccacttcctgaacgccagcctgaccgacgagagcatcggcaacctggccgacctgttcgagaacctgcgcatcgccgtgaaggaccagctggacgtggagctggcctaccccgagcgcatggaggacctggagaacatcttcatcgacaagtccctgtccaagaccgagaaggtcgagaagatcaaggccctgctgaagatcgacaagaaggaccggctgcaggccgagctgtggaagatgatctgcggcctgtccggcaccctgtccgtgatcttccggcaggacaacttctccgaggaggacaagaagtacaagctgtccttccgggacgggaactacgacgagaagatcaacgccgtggccgagatgctgagcgaggagtccctggacgtgctgatgctgatcaagcagatccacgactggggcgtcctcgccgacatcatgcgcggcagcggcaagacctacgagtacctgtccttcgcccgggtggacagctacgagaagcacaagaaggacctggagaccctgaagtacctgtacaagacctacgcccccgagaagtaccacgacatgttccgggtgatgaaggacaacaactactccgcctacgtgggctccgtgaacgccgggaaccacgtggagcggagggggtacaagcacaagaccgaggacttctactccgccctgaagaaggagctccagaacttccccgagagcgccgagcgccagtacgtgctcaacgagatcgagaagggcaccttcctgcccaagcagctgaccgcctccaacggggtggtgcccaaccaggtgcacatgaaggagctgaagaagatcctggccaacgccgagaagtacctggccttcctgcagcagaccgacgagaccggcctgtccgtgagcgagaagatcatccagctgttcggcttccagatcccctactacgtggggcccctggtgaacaaggccgacaaccacgcctgggtggtgcggaaggagggcgggagggtgttcccctggaacttcgagcagaaggtggacgtgaagcgcaccagcgagctgttcatccagaacatggtgaaccactgcacctacctgagcgacgagtacgtgctgcccaagaactccctgctctacgagaagttcatggtgctgaacgagctgaacaacctgcggatcaacggggagaagatctccgtggccctgaagcaggacatctaccaggacctgttcaagtccgggaagaaggtgaccgccaagcggctgtgcgactacctgatcgtgcacggctacgtggacaacgagacccccatcgacctgtccgggatcgacggggacttcgtgaaccgcctggccaactacaagaagttcagcgaggtcttctacgtggagaccctcacctacgagcaggagcagatggccgagcagatcatcttctggtccaccgtgtacggggactccaagaagttcctccgggagaagatccaggagaactacggggaggtgctgagctccaaccagatcaagcggatcctgggctacaagttccgcgactggggccggctgtcccgggagttcctgctcctggagggggccgacaagaccaccggggagatcagcaccatcatcagccgcatgtggaacgagaactacaacctgatgcagctgctgagctccgagcagttcacctaccgcgaggaggtggagaaaaagaccaagcacatggaaaagaccctgagcgagatcacctacgaggacctggaggacctgtacatctccgcccccgtgcggcggatgacctggcagaccatcctgatcctgaaggagctgtgcggcgtgctgggccagtaccccgacaaggtgttcgtggagatggcccgggagcacggggagaagaacacccgcaccgtgtcccggaagaagaagttcatggacctgtacaagtcctgcaaggacgaggagatccagtgggccaagcagatcgccgacaccgaggagcggaagttccgctccaagaagctgtacctgtactacacccagaaggggcggtgcatgtacaccgggacccggatcgagctcagcgacctgttcaacgacaacctgtacgacatcgaccacatctacccccggcacttcgtgaaggacgacaacatcgacaacaacctggtgctggtgaagaagcaggtgaacgcccacaagagcgacgtgttccccctggagcgggacatccagaagaagcaggccgccatgtggaaggagctgcggcagggcaacttcatcaccgaggagaagtacaagcggctgacccgcaacgaccccttcaccgaggaggagcaggccggcttcatcagccggcagatcgtggagacccggcagggcaccaaggccatcaccgacctgctgcagcagacctgcccccagtccaagatcatctacgtgaaggccggcaacgtgtcggccttccggcagaagttcgacctgatcaagtgccggaacgtgaacgacctgcaccacgcccaggacgcctacctgaacatcgtggtggggaacgtgtactacaccaagttcacctccagcccccgcaacttcgtgcgggagtaccggcagaacaaggagaagcacccctaccacatgtaccggctgttcgactacgacgtgcggcggggcgaggaggtggcctgggagatcgggaaggacgggaagggcaagtccatcagcaccgtgaagcgcatggtgctgaagaacaccccgctggtgacgatgatgaacttcgaggtccacggcgggctggccgaccagaccctgtacagcgccaaggacgccaaggacggcgagggctacctgcccctgaagtccagcgacccccggctgcgggacgtggccaagtacgggggcttcaccaagtacaccgggacctacttcttcgtggtcgagtacggccaggagaagaagcggatccggagcatcgaggccgtgcccctgtacctggccgagcgcctgtccgaccgggagaacctggaggtgtactgccgggacatgctgggctaccaggaccccaagatcatctgccggaagatcaagatgtacagcctgatgaagatcaacgggttctacctgtacctgaccgggcggaccggcacccggctgaacgtcgtgaacgccgtgcagatgatcctggactacgagaacatgtactacgtgaagcggatcgccgacgcctccgagcggaagtacaccgacgaggactacgaggagcacgaggtgatctccaaggagaacaacctgcggctgtaccggcagctggaggagaagcaccgcgacaccatctaccagaagcggcccaaccccatgggctccaagctgcaggagatggaggggcggttcgaggagctgtccatcgcccagcaggtgaaggtgctcctcgagatcctcaagctgtcccagcggctgaaccagggcgccgacctgaccctgctgggcggcgccaagaaaaccggcacctccaagatcggcaagaagatctccgagctgcaggagtgcaaggtgatcaaccagtccgtgaccggcatgtacgtgaacgaggtggacctgctgaagaag

SEQ ID NO: 221 - DNA, 4032 bp, synthetic construct
  source 1..4032: mol_type = other DNA
gtgcacaagaagctgatctacagcatcagcatcgacctgggcgccaagaacaccggcgtgtacttcgcctcctacgaggagcggagccgggtggacaacatcaagtccgagggcaaggtgtaccagctggaccccaacagctacaccctgctgctggagaaccgcaccgccaagcggcaccagcggcggtgcttcgaccggcggcagctggtgaagcggctgttccgggtgatctggcagaagcactttgccctcatgtggaacgacgagacccagcaggccatcagcttcctgctgaaccgccgcgggttcacgttcgagcccgagaacgagaacgagcggcaccggcgctgctacttcgaggagatcaagaagatcctgaccaccaccaactacccccaccggtacctgaagcacttctgccagaagctgcacaccggcaagttcaagggcctggacgagaagaagctggccaacctgatcggccacctgaacaacctggagctgaagccgctgcggtggtacttcaacgacaagcggcactcccagggcgactactgggacaagaaccggctccaggagatcttcatccactgggtgatcaacacctggcggatcgacaagcagaaggacaaccagcacgacaaccagaaggagaaaaagaccaacggggagtacaactaccggaagctgaagaacaacctgcagcaccaggaggacatcatcgagttcttcctgaccaccgaccccaagcgggccatcccgccctaccaggacaacaacaaccggcaccctccccggtgccagtccctgctgctgaaccggaagttcctggacgaccactacccgcagtggcagatgtggctgcgggacctgaagaagctgtgccccgaccccgtgaaggacttcatcgactccctgcagtccctgatgtcctccggggacaagccctacttcgtggagtccaactccgtgtactgccagagcatcagcgacctggacgcccggatcctgcagttcatcttcgaccaggccaaggacagcgaccccttcaagctgaacgagatcttcgcctacacgaagaagctgcggcagctgcagagcagcagccaggagaaggagcaggcccgcgaggacatcgagcggaccatcgagtccagcaagctgagcaagaacctcaagaccgcccggaactacgagaacgaggtgttcgccgagggcagcttcctgcacctggtgtgccggtactacaagtaccggcagaaggcccgggccgggcggatcttcatccacgacaccaacgacgtgttcctgacctactgcgaccggaagccccggcacaagaagcaccagctgctggacgacctggccagcctgctccgggtgtccaggacccggctgcggaaggtgatcgggtccaacgacaacagcaccgacgaggcccgggtgaccgcctggctgaagaacttcaccgggctgaagagcaacgcggagaagagctgcgacgagcagaagaagtaccggggcaacatcaagaccaagatcgagggggtgtacttcaaggaccagaagaacgcctccctctacaaggtgtgcgagcgcagcaagaagctggtgcacgccatcaactgccagctggacaagcccaaggacaccaccctggacaacaaccccgccaaggccatctacaccctgtcccaggtgcacaacctgatcttcaaggacaggtccgggaacgccaacacctgcgccgtgtgcagcgccgacaacgcccagcggatgcaggagatcagcgggcgggccaaggcccagcggctgcccgccatcaacacccggctgatcgacggcgccgtgaagcgcatcgcccacatcgtgggcggcgccatcgccgacgagggctggaagcacatcgagcagaagctgagccagggccaggccgtgcgcgtgcccatcatcaccgagtccaaccggttcgagttcgaggagaacctgggcgtgctgaagaagaaggccaagaagtacgggaagcagcccgacttcttcgtggagaaggagaagcgcatccggcgcgcctcccagggggtgtgcccctacaccggggccgacctggacgggggcgagatcgaccacatcatcccccggtccagcgagaccggcaccctgaacgacgaggccaacctgatccacgcctccaaggagggcaaccggcagaagtccaacaagaagtacttcctgtccgacctgcacgcccactacaagcgcaagcagttcgactccaccgacgacaacgagatcacccggtggatcgaggagcagctgggcggcgacaagaagtacgagttcaagttcggccggtacagcaacttcctgaacctgaccctggaccagcagaaggccttccggcacgccctgtacctccccacgaaccacaagctgcggaagctggtgatcaagaccatcgatcaccggaagcagagcttcgtgaacggcacgcagcggtacttcgccgaggtgatcgcccggaacttctaccagaaggccaagaagctgggcaaggcccggcagatcagcttcgactacttcgccgtggaggcccggtcctccacccggggcgacggggtgtccgactaccggcggcagctggagaaggacgacgccatcctgcagaagtacagcaaggaccccagcaagaagcagaacccctacagccacctgatcgacgcccagatcgccttcgccatcgtggccaacaaccacaagcgcgacggcgggctgaagctggacatcgccgaccacctcgaccccgaggacatctacaagaagatccggctgaccgacagcaacatctactgcgacaagctgaagcggaagaagcccaccgagaccttctgctcccaccgggccttcacgcgcgacaccctgtacgccgaccactacctgcccatcctgctgaagaaggagaccgacatcgtgtgtcgggccgggttcacctggaagaactccttcaagttcgagagcaaggacaaccagaacctgcagaagctgctgccgctgtgcgcccacctgcccagcggcatcgagatcgccgccctgtacgacaagctggcgatcctgcccaagttcaaggagcagctgcaccggcacgggtactactacctgtgcgtggacaagcagaagctgcacgacttctggctgcggggccgggacgacaccggcgccttcagcgacaaggagttcttcggcttctgctggtccaccatcgggtaccggaccgagaacaagcccatcgccaggcccaaggacctggtggacatcctgcagaaggatgccaagttcaaggtggggaagaacgagtgcgtggagctgcccgtcaagaaggagtggcagcggtgcctgaccgcctggcagaactccgggaaggacgacaaggagttcctgtgcttcctgcaggagtacttcaaggcggcccccaaccacaagcacgcccaccagaaaacccggaacgtgtacagcctgcccgtcaagaccggcgagggcaagctgctgctgcggcggcggaactggaacgggaagcacaccgaccagatcatcaacgactccgacagccgcagcgtggacaacaagccctgcctgcccgtgcggaccagcgagtacaagaaggccgagcggctggcctggtgggcccagaccaagaacacggtgaagctgagcaccgacacctaccacaacggggagcacatcaactccgagcggtggtaccccatcgagtgccaggacttccccaccggggtgaaggggatcgagtaccgggtggacgactgcacccggccctcgatccggctggtgctggagcggtccaaggccatcgtggccgacgggatcctcaagcaccccctgtgcaaggccaaggagaagtccaaggccaagagcctgatcgagggctccaccggcaccgacgtggagtacaaggcctccgggtacaaccgggagatcaccagcgccctgcaggagtccctgcggaagcaccactcc

SEQ ID NO: 222 - DNA, 4161 bp, synthetic construct
  source 1..4161: mol_type = other DNA
atgcggaagaaggtggaggactacgccatcgggctggacatcggcaccaacagcgtggggtgggccgccatcgactgcgactacaagctggtgaaggtgaacggccgcgacgcctggggcgtcgtgctgttcgagagcgccaaccccgccaaggaccggcgggtgttccgcagcgcccgccggcgcctggagcggcggcggatgcggatccgcctgctgcaggagctgatggccgagggcatcgagcccgtggaccccaacttctacatccgcctgaaggagtcctcctaccacgtgggcgagggcaagtacttccgcagcaaccacttcaacctgttcgacggcggcgagtacaccgacgcccagtacttccacgagtaccccaccatctaccacctgcggaagcggctggtggagaacaaggagaaggccgacatccggctggtgtacctggccatccaccacatcatcaagtaccggggccacttcctgaacgagggcgggatggactccgccggcggcagccccgaggtggccgccggcgagctgttcggcctgctgaacgagaactacaagaaggacctgttctacatcggcaaggaggaggccttcacccaggccctgctggacggcaagtccagcaggagcatgcggcaggagaacgcctacaacgtgctgaccagcgagaagaaggacaagttcgtgaccgccctgaccaaggcggtcaccggcctgaaggccaacctgaccgacctgctgtgcctggaggacgaggaggacgccatcaaggacgagaacgacaagcccgtgtccatctgcttcgccgacgccaagtacggcgaggagaaggaggacaagtactacagcctggagcgggccgacatcctgctggccgccgagaagctgtacgccgccatcgagctgaacgccgtgctgcgcggcaagaagctgctgtgcgaggccatggtggacaagttccggaagcacgccgaggacctggccgccatccggaagctgatccggggcatgggcgacaaggccctgtacaacgacttcttccgcaagggcaagggcgccaactacaccggctacatcggcgacaagcgctacggcttctacggcgaccgcggggacgtctgcaaaaagaccaccaaggaggacctgtacaagcggatccgggagatcctgaacaaggcccccgagtcccgggagaaggagtacatcgagaaggagatcatcaaggaggacttcctccccctgatcacctccaaggacaacgcctacatcccctaccagctcaacctgaaggagctggacgccatcctggagaaccagggcaagttctacccctgcctggccgagaacgccgacaagatccgggccctgctgaccttccgccggccctactacgtggggaccctgaaggggaagttcagctgggccggcgacatcgagctgcccgaggaggagatcacgccctggaacttcttcaagaccctgggggaggaccggctggacaagctggccgagaacttcatctcccggatgaccaacgactgcatcctgatcaagggggaggacgccctgcccctgaactccatgctgtaccagaagtacgtcctcctgaacgagatcaacaagatcaaggtgttcgacaagcccatcagcgtggagtggaagcaggccatctacgagctgtgcaagaagcgcaagaccgtgaagaagtccgacatcgccgcccggctgaacaagaagttcaacatccagaccaccgccgacaacatcggcgggctgagcgacgagaagaagctcaccgccagcctgtccacctacgtggacttcgtcaagatgttcggcgaggagttcgtgaaggccaacttcgacgccctggaggaggcggtccgcatcctgaccatcttcaacgacaccgacatccgcaagaagcggatcaaggagctgaaggtgttcgagggcttcgaggagcggctggccaagaagaacttctccggctggggcaagtacagccggaaggccctctacggcaccctgggcaacaacgggaagtgcgtgctggacatcatgtacgagaccaacgagcacatcaacgaggtgctgtggaaggaggagtacggcttcaaggagaagttcgtggacgagaccgagcccatcgagaagttcgtgtacgagcaggtggaccggatgcggatcagccccaaggtgaagcggggcgtgtggaacgccatccgcctggccgaggagctggccaagcagatcgggtgcgaccccaagtacatcttcctggaggacaccaccgagatcggggagaagaagcgcaccaagtcccggtacgacaaggtgtgcgagttctacaaggccctgaaggacgggggctacaaggacatcatcgacgaggagaacatgaagtactgccgctccgagctggccaagtacaaggacaagaagtccgccatggacgaggacaagctgtacctgtggttcatccagctgggccgcagcatgtacagcgacaccaagatcccgctggagaagctgcccgagtgcgagatcgaccacatcatcccccggagcctgatcgtggacaactccttcgagaaccgggccctggtgctcaagaaggagaaccaggccaagggcgacggggcgatgagcgtggacatcgtgaagcagatgcggcccttctggaagttcctgtacgacaacaagctgatcgggagcaagaagttcaccaacctgcagaaaacggagatcaccgagaaggacctggccggcttcatcaaccggcagctggtggacaccggctacatcgtgcggctggtgaaggagctgctgatgcgccggttccccaacgccgaggtgcgcggcgtcaagcccaagctgtcctccaccatccgcaagcggttcgcctccgaccacacgtacttcaacggccaggagtacgtgacggagaaggggaaggccgggttctacaagatccggagcctgaacaacttccaccacgccaaggacgcctacctggcgtccgtggccggcctgttcaccacctacagctgccccctgtgggggaacagcgagtacaacaaggccatcaactactacatcaagaaccccgagaagtccaagtacaacaccaagggcggggacaaggagagccaggagaaggccaactcccggaccaccgccacgctgatcaacaagcggtacggcttcatcgtgaacctgatgatgcagaccgagcggcccgacctgttcgccctggacgagaagtccggggagtacctgtgggacaccaaccggtacaacaacatgctggagacgatggcccgcaacacctgcaacgtggtgaagaagaagcagtacatggccgccagcgacttctacgaccagaccgtgtacagccccaagagctccaagaaggggctgatccccctgaagagccacgggggcgaggacatgcccaccgagttctacgggggctacagctccctgagccccgcctacttcatcgccgtgcagtacaccaagaagggcaaggtgaagtacgccttcgggaacatccccgtgaagatcgccgtgaacggcaccgccgccgtggacaagtacgtgcgggagatgtacggcgacgaggccaaggtggtgcggaagatctacaagtaccagctgatcaactacgaggggcagcaggtgtgcatctccggcaacctggacctgcagaacgccacggagatctacgtggcccccaagttcgaggagctgctgtggctcgtcgagaaggggaaggtggacatcctgtccggcaagccggacaaggagggggagatcaaggacttcaacggcctgatcaaggagttcatcccccacatctgctacatcatccgccggaagctgcccctgtacgccaacctggtggacaagctggagcagatcgacaaggagtacctggacgagatgacgatggaggagaaggtgaagctgctctccgacgtcatgctggcctgccacaccggcgccggctccgccaccctggacaagcgcctgggcggcgagagcttcggccggatccggaaggtgatcgacccctccaaggtggactggatcgacaagagcctgaccggcctgtacacccggaccaccaagggggtg

SEQ ID NO: 223 - DNA, 3348 bp, synthetic construct
  source 1..3348: mol_type = other DNA
atgaacaacaactacgtgctggggctggacatcggcatcaccagctgcggctacggggtggtggacctggagtcccggaagttcgtggactacggggtccgcctgttcaaggaggggaccgccgccgagaacgagaagcggcggtccatccgcggccggcgccggctgatcagccggcgcaagacccggctgaaggacatgcagaagctgctgaagaagaacggcatcatgtccgagaactacaagtccctgaacaacatctacgagatccgctgcaaggggctgacccagaagctgaccagcgacgagctgacggccgccatcctccacatcaccaagcaccgcggcagcgtgctggagaccgtggaggaggacgccgagaagtccgtggacaccgagggcctgaaggccaccctgcagcggaacgagcagctggtgcggtccggcaagtacatctgccagatccagatggagcggctgaaggagaagaacaagatccggaaccacggcaacaacttctccaccaaggactacctggacgagctgaaggagatcctggaccaccagaacctgaacgacgacctgaagaagtccatcgtggagatcgtgctgcggcgccggaagtactacgagggccccggctccgagaagagccccacctcctacggccgcttcatcgaggtggacgggcacatcgagaagatcgacctgatcgagaagatgcggggcaagtgctccgtgtaccccgaggagctgcgggcccccaagatgagcgtgtccgccgacctgttcaacttcctgaacgacctgaacaacctgaccgtgaccggcaacaagctctccaccgacgagaaggagagcatcctgagcatcatcagcgagaaggggaacatcaccctgcgccagttcgccaagaagctggaggtgtccgaggacgacatcaccggctaccggatcgacaagaacaacaaggccatcttcaccgagttcaagggctacaagaagatcaagtccatcctggagaaggagggccggtccgtgagcctgaaggactacaagatgctggacaagatcatcgagatcctgaccaacaagaagggcatcgaggaccggaaggacgacctggccaacgccgacatcgggctgaacgacgcccagatcgaggtgctggccaacaccaccgggatcgtgggctaccactccctgtccttcaaggccatccggctcctgaacaaggagctgttcgagaccgagatgaaccagatgcagctgctgcacgagctgaagctgttcgaccagaaccgcaagtccaccaagggcaagaagaacatcgagaccgacgacgaggccatcctgtcccccgtggccaagcgggcccagaacgagaccttcaaggtcatcaacgccctgcggaagaagtacggcgagttcaactccatcgtggtggagatgacccgcgacaagaactccgacgagaagaagaagcggatcaaccagttccagaagaacaacgagaactcctccaaggacatggacaagttcctgaaggaggccggcttcgaccccgagaagatcaacggcaagacccggatgaagatccggctgtacctgcagcaggactgcaagtccgcctacaccttccagcccatcgacctggcccggctgatcaaggaccccagctacaccgagatcgaccacatcatcccgatctccatctccctggacgacagccagaacaacaaggtgctggccctgcacagcgagaaccagcagaaggagaacctgacccccttcatggccttcaactccggcaagttcaaggggatgggctgcacctacagcgagttcaagacgaacgtgctggccaacaagaacatcccctacaagaagaagctgaacctgctgaacgagaaggacatcaccaagctggaggtggtgaaggagttcatcaaccggaacctggtggacacctcctacgcctgccggaccgtcctgaacaccctgcaggactacttcaaggacaacggcatcgacaccaaggtgcacaccgtgaacgggcggctgaccgacctgttccggaagcggatccacctgcccaaggaccgggaggaggacttcctccaccacgccgtggacggcctgatcgtggccagcatcaagaagagcaacctgctgaacgggtacctgagcaagcacgagttcagcgacctgtacgacgagatcaccggggagatcaagaccatccccgacgacaagcagttctacgatgagacctacatcaggttcatcctggagctgaaaaccatctacgaggagtccaacaagtactacaaccacctgatcgacaaggccgacatgctgttctaccccatcaagatctcccagaagatcaacaccaagcccaaccggcagatcgccgacgagacgatctacagcacccggaagtacgacgacaccgactacctgatcgagaagatccccgacatctacgaccccaaggacaagaagtgcaagcggctggtggagaacatcctgaacggcaccgacaacatctacctgatgtccaagcacgacccccagaccttccagctgatccaggacatcgtgaagtaccactacgggcagttcaaggacgacggggagacctacaaggtggtcgagaagaaggggaagaagaagatcatcctgaacggggagaaccccctgaccagctacaagaacgagaacggcttcatccacaagtacagcaagaagggcaacgggcccgccatcgtgagcatgaagtaccagtccgagaagctgggcaaccacctggacatcaccaagaactacgacgccaagaacaagaaggtgatcctgaagcagatcagccccttccggaccgacttctacaagtgcgaggacggcaagttccgcttcgtgaccgtgcggtacagcaacgtgaagtacaagaagtccatgaagcggtacgccatcgacaaggactggtacgccgtggagaaggagaagaaggggatcaagtccaaggacgtgttcctgttctccatgcaccgggacgagctgatcggcatcgtgaagaaggagggggacaagtacatcttcgactcctccaccgagtccaacggcaagacgatgtaccacgacgggatccaccccgagatcctgaagttcaccgccaccaacaacgactccgagaaccggatcgaggtgaagccccgctacaccagctgcaagaagcagctgatcagctccctgggcagcatgcggaacctgaagaagtacgccaccgacgtgctgggcaccctgtacgaggtgaaggacaacaagctgaagctggagttcgactga

SEQ ID NO: 224 - DNA, 4272 bp, synthetic construct
  source 1..4272: mol_type = other DNA
atgtacaacaaggtgctgtgcggcctggacatcggcaccaactccgtgggctggtgcctgaccgacgagaacaacaagatcatccggaagaagggcaaggccctgtggggcgtgcggctgttcgacgaggccagcgactgcgccaagcggcggcagtaccgcagcacccgccgccggctgaaccggcggcgggagcggatcgacctgctgcgggagctgatggccgaggagatccaccgcgtggaccccaccttcttcatgcggctggacaactccttcttccagaaggacgaccgggaggaggacttcgactacaccctgttcaacgaccggaactacaccgacagcgactactaccgcgagtaccccaccatctaccacctgcgcaagcacctgctggagtcccgctccaaggaggacatccggatgatctacctggccctgcaccacatgatgaagtaccggggcaacttcctgtccaacgccaaggagttcgagcccatgaaccccaacgacgccgacgagtacttcgaggagctgaagcagtccctggccaacacccgggacggggtgaccatcgagtacgacaccaccaaggacttcagccgcctgaaggaggtgttcacctccgagcacggcatcaccgtgctcaaggagaagctggggaagatcctgaaccccaacaacgacgcctacatcaagaagatcgtgatcctgctgatcgccggcgggaccatcggcatcaaggacctgaagttcgaccagaccgaggacctggacttcaagaacctgtgcgtgaaggacgagaagttcgaccagtacatcgccaccctgctgtccaccaacgaggagcgggaggaggagatcaacgccctggcctcctgcaagaagatctacgagttcttcctgctggggaagctgctgggcgaccagtgctacctcagcgacgccatggtgaagcggtaccagatgcaccaggagcagctgcgggagctgaaggcctacgtgaagaagaaccacaaggacaagtacgcccggatcttccgcaagcccatgcggaacaagtccaaggccaacggggtggagaaggagaacaagaaggaggagctgaacaactacgccatgtacatcggctccaacctgaccgggaaccacaagaaccggaccgcccactgcaccgccgaggccttctacgccttcctgaagaaggagctggggctgaccaaggtcaagagcacccagaaaaccaaggagacctacgagtcccagatcctggacctgatgtccaacggcgagttcctgccccggctgaactccaccgacaacggggtgttcccctaccagctgaacctgatggagatgaaggagatcctgaaccgccagagcgagttctaccccttcctgctgaccaaggacgaggacggcatcaccgtgaaggaccagatcctgtccgtgctggagtacaagatcccctacttcgtggggcccctgatccccaaggaggaggggaacgagcgctccaagtacgcctggatcaagcggaccgacgagaagatccgcccctggaacttcaagaaggtggtggacctggacgagaccgccaagaacttcatctacaagatgctgaacaagtgcacctacctgcccagctgctactgcctgcccaaggacagcctgctgttcagctacttcaacgtgctgcagatcctgaacaagaccagcatcaacggggccagcatgcccaaggacttcaaggagtgcatcatcgagaacctgttccgcaagcggcggaaggtgacgaagaagcagctcgtggagttcatccgggccgagtccggggacaaccaggcccagatcaccacctccaccggcaaggagatggaggagatcaacgcctccctggcctcctactacgacttcaaggacatcttcggggaggagtacgtgtgctcccacatcgaggagatcgaggacatgatccgggacatcgtgatcttcgaggacaagtccatcctggagaagcgcctgaagcaggtgtaccggatccaggacaagaccgccatccggaagatcaagggcctgaactactccaagttcagcaacctgagcaaggagctgctgaccgacctgaagttctacgacgagagctccgagcggaactgcagcgtgctgcagctgctggaggagaccaaccagaacctccaggagatcctgtacgacgagacctacggcttccagaagaagatcgaggagtacaacaagaaccacagcggcaccggcgagttcgagaccatcgaggagtacgtgaaggagctgggcgccgtgtccccgggcatgaagcggcccctgatccaggcctacaagatctgcgatgagctggagaagatcatcggccagcccatcgacgagtactacgtggagtgcacccggaccaaccgggccgagaagaagcggaccagcagccggtacaagaagatgcaggagctgtacgaggaggccatcaagaccgccggcgacgactacgagttcaagtccgcctacgagaagttcaagtccgccgaccccaaccagttccagagcgacaagtactacctgtacttctcccagatggggaagtgcatgtacagcggcgaggccatcgacatcggggagctgtacgacaccaacaagtacgacatcgaccacatcctgccccagagcatgatcaaggacgacagcctgtccaaccgggtgctggtgaagcagagcctgaaccgcaccgacaagcgggaccagtaccccatcccccagagcatgctcttcaacggcaactaccgggaggcctaccggttctaccagagcctgaaggagaagaagctgatcagcgaggagaagtaccaccggctgatccgcaaggaggccctgtccgagaaggagctgagctccttcgtgaaccggcagctggtgagcaccaaccaggccgtgaagggcttcatcaacgccatccgctacttcaagaccaccgagagcttcacccccaagatcatcttctccaagagcgagaacgtgagcgacttccggaagaagcacgacctggtgaagtgccggagcgccaacaacttccaccacgcccacgacgcctacctgaacatcgtggtggggcggaccatcgacaactacttcgccccctacgacccctacatcagccacgaccaccggaacagcgtgctgcaggagatgcacgccaacgggctgaccaccaacccctccaagatcttcgagcagaacaaggaggggaccaagaagaacatcaccgaccgggacggctacgtggtgtgggactacaaccagtccatccagaaggtgaagaaaaccatcaagaaccggtacgacatcctgaccacccagcgcacctacttcggcaactccttcttcggcaagatgaccatcatgccgaagggggagggcaacatcagcgtgaagaagggctgggacaagcagaagtacggcggcttcaaggagtacagcttcggctcctactccctgatcaaggtgaaggaccagttcatcctggaggccatccccacgatgctgcggaagcggaaggaggagtacctccgggagcgcttcggggagtacgagatccgcctggacaacctgaagatcaacaccgtgttcgaggtggacaagaagaagttcgtgatcaccggcaagaccggcgaccggtacctgctgatgaaccagaaggaccggatcttcagctccgagcagatggagaccctgcggaagatcgacaagctgttcgacaagctgaaccagaagatcggccccaacgaggaggaggaggaggagcggaagaagctccgggagtgcggcatcaaggtgaacgacgccgacatggtgatcgcccccgccaagaacgaccaggccaaggagatgcggatcacccaggaggaggccgtgcagatctacgagaccttcatccagctgttctccaaggagatctactccttctccgtgatcaacaagctgggctgcaagctggaggggaagaagaaggagttccagtccctgagcctgttcaagaaggtgtacctgatccagaagatcaacaacctgctgcgctgcaacgagcgcaagaccgccgacctgcgggccatcggcttcaaggagcaggagggcaccctgactatgaaccagaagctgagcacctgccggatcgtgttcgagagcatcaccggcttctaccgcaaggtggtgttcgagtgcaaggacggcgtggagtgcggctga

SEQ ID NO: 225 - DNA, 3966 bp, synthetic construct
  source 1..3966: mol_type = other DNA
atgaagaactacagcatcggcctggacatcggcaccaacagcgtgggctgggccgtgatcaacgaggacacctacaaggtgctgaagaagggcaacaacaagctgtggggcgtggagaccttcgcctccgccgagcaggccaaggaccgccggctgaagcggagctcccggcgccggtacaaccggcgcaaggagcggatcaagatcctgcaggacatcttcagcaaggagatcaacaaggtggaccccaacttcttcaagaagctggaggagtccaagctggagaacagcaagaagaacatccccatcaacgggtgcgagaacaagaacatcaaggagtactacaagaagtaccccaccatctaccacctgcggaagcacctggtgaacaccgccgagaaggaggacatccggctggtgtacctggtgatccaccacatcatcaagtaccgggggaacttcctgtacgagtccgacttcaacgtgaacaacatcaacttcatcaacaacctgaagtccctgttcgagaactgcctgaagtacaacaactacctggagatctccgacaacatcaacgagatcaacttcgacgtgatcgacaagacgatgctgaacgacagcaagaacgaccagtcgatcaagctgaagaaggagctgtccaagatcatgtccaagaacaccatcaacgagttcgtgaagctgctgcagggcgacaagttcgacgtgatcaagctgttctccatcgacctggagggcgagctgaaggtgaccttcaaggacaagaacttcgacgagagcctggacaagctgtccgagcacagcgagtacgaggacctcgtcgagttcatctacaacctgaaggacatctacgacggcatcaccctgaagaagctgttcaagaacagcaacatcacgtccctcagcgacctgatggtgtggaagtacgagaagcaccagaaggacctgatcctgctgaaggaggtgctgaagtccaaccaggagctgtacgacaagatgttcagctacaacgacacctccatctaccggaagtacgtgctgaacaagatcaccagcgaggacctgaagaaggagatcctggggtgcctggacaccatcaactgcaaggaggacatccggaccaagatcgagaacgacctgaccgagaacaacttcatgccccggatcaccaccgtggagaacgggatcttcccctaccagctgaacaacagcgagctgaaggccatcatcaacaaccaggggaagtactaccccttcctgctggagaagtggcaggacggcaagaccctgctggagcggctcctggagttccggatcccctactacgtggggcccctgaactccaagagcgagttctcctggctggtgaagcagaaggaggacaagatcacccccttcaacttcaacgaggtggtggacatccccgcctccgccgagcggttcatcacccgcatgatcggcaagtgcagctacctgatcaaggaggactccatgcccaccaacagcatctactactccaagtacaaggtgctgaacgagctgaagcagatcaagatcggcatcagcggcaaggagcggaagctgagcatcgagctgatcaaccagatctacaacgagctgttcctcaagaccagcggcaccatcaccgacaagaagctgaaggagtacctcaagaccaaccccaacttcgacatgttctacaacgagaacatcaacatcaccgggtacagcgccctgaacgccttcgccaacaacatgaactcctacgtggacttcttcggcgagaacggcatcttcaacggcaccaacttcaacatcgacgacgccgaggagatcatcaagtgcgtgaccatcttcgaggacaagaagatcctgaagcagaagctgaaggacaagtacaagtcctgcaacctggagcgcatctgcaacctgaagtacaaggggtggggccggctgagcaagaagctgctgatggagacctacggggtgaacaagaacaccggcgaggcccacaccatcatggagctgctgaaggagaccgacatgaacttccagcagatcctgttcgacaaggactacaacttccaggagatcatcaaggacgagaacaacaccaagcaggtgaccaagatcaactacgatctggtgaaggacctggtgacctcccccgccaacaagcgggccatctaccagagcctgaagatcatcgacgagctggtgaagttcatcggctacaaccccaacaacatcttcctggagatggcccgcgagaactccaccaagaagcggaccgacaaccgcaagcggcagctggagaagatctacgacaagtgcaagaacgagctgaacaactacggcaccctctccaaggagctggagaggatcgacaacaaggagatcaccaacaaggtgttcctgtacttcatccagaacgggaagtccctgtactccagcgagaagctggacctggacctgatcctgtccaagaaggacaactaccagatcgaccacatcatcccccggaccctgaccaccgacaacagcctggacaacctggccctggtgctgcacaacgagaaccagaacaagtccagcaacttcatcctgcccgaggagtaccggacctccgagatcatcaagtggtggaaccacctgaagaagatcgggctgctgaccaccaagaagtacaacaacctgtgccggacctccttcagccaggaggccatcgagggcttcatcaaccggcagctggtggagacccgccagatctgcatcaacgtggccaacatcatcgacacgtacctgaacaagggcaagaagatcaccaacatcgtgtacctgaagtccgggatcagcagcgggtaccggaacaagtacgagctgttcaagtaccgggggctgaacgactaccaccacgcccacgacgcctacctggccgtggtgctgggcctgtacaagaagaagtacttcaagtaccccgacgacttctccaccatcaagagcatcaacaagaccctctacgaggaggggaagttcaaggaggccaagtacgggtacttcctgaacagcctggacgaggagtacagcaagcactacaacatctccaactccttcaacctgaaggggttcaacgagaccatcatccggaccctgcaccagaacgacatcggggtcacccgcaagacgttcatcaagaacgacggggagctgttcaaccagaacccctgctccaaggaggaggccaaggtgcccctgaagaaggggatggacatcaagtacggcggctacacctccctgaaccaggggtacttcgtgctggtgaactacaagaagggcaacaagttcatcggcatccccctgtactacaccgacatgatctcccgggacaagtacatccggagcgagctgaagctgaaggagaacgagacctacaccatcaagaaggacaagatccccttcgacaccaagatccgctggaagaaccagtgcttctacatcaaggggtactccaacggcctggagctggccaacgccacccagatctccttcgacagcaaggcctacgacgactacaagtacctgctgtcctacatcttcaacgagaaggacgtgatcaacgaccgggaggagaccaagatcgacgagctggccgactacgtgttcaccaaggccctgagctactaccccatctacaacaagaagctcagcaagctgcaggagaagtacaagaccctctccgacagcaacaacaagcggatcttcatccgcgagctgttcaacatcaccgggacctccaacaccggcgcgtccttcaagaagttcgacctgatcgaccgcatgcagcggctgagcaggcagaaccccaaggacaactgctacatcatctacgagtcccccaccgggatctacaagaacgagttcaacatcgagggggacaacgagctgtga

SEQ ID NO: 226 - DNA, 4506 bp, synthetic construct
  source 1..4506: mol_type = other DNA
atgtccgacaagaagtactacctggggctggacatcggcaccaacagcgtgggcttctgcgtgaccgacgagacctacaacatcatcaagaagcacaagaaggtgacctacatctccgagaagaaggaggagaagaacaacaagcccaacaacaagtactacgggaaccacctgtggggcgcccggctgttcgacgccgcgtccagcgccaaggaccggcggaccagccgggaggcccgcaggcggttccggcggcggcgggagcggatcctgtacctgcagaaggagttctccaccgagcggaacaaggtggacccctacttcttcgacaggctgaacaacagcgccatccacatcgaggaccgcgacgccctgctgcaggagcaccacctgctgttcaacgagccccacttcaccgacgtggagttcttcaagaagtaccccacgatctaccacctgcggctggcccggatcgagcaccccgagcagaagttcgacatccgggaggtgtacctggccctggcccacatgatcaagtaccggggcaacttcctgttcaaggggaccatccccgagagcgggtgcgacgccgaccggatcctgaacaccttcaacgagctggacagctacctggacgagaaggagcggttctgctgcaccaacgagaaggccagcgagctgctgaaggtgttccagagcgagacccgggtgcaggacctgcacgacaagatccagtccatcttccccgtggaggacaagcacaacagcttcaagaaccagcggatctacctgatcgctggcgccagccgcaagaccgacgccgtgttcaaggacagccccgacatcgacttcgacatcatcgacgacgagatccagggggtggacatctgcctggggaacgccgacttcgaggagaaaaccctgtcggccatctccgaggccatcggggacaacaacaccaagatcctgctgtccctgaagaagatcttcgcccgccggaacatccagcggatcatccgggggaagaagagcatcagcgccgccatggtggccatctacaacgagcacaacaagcagctgaaggtgctgaagcagctgatcaagcggtacaaccccaactactacagcgccttcttccggcacgccgacgagatcaagctgtccagcagccagaccaacaacaagtgctccaagacctacaagacctacgcctcctacatcggcagcaccgtgctgaaggggaagcggcggcggttcaaccacgacaccaccacccccaaggagctgtactccaccatcgagtacctgctccccatctccaagatcaagcccaacaagaagggcgaggagcagaacttcaaggagaagcggcccggcgacaagaaggagctgctgaagatcgacaccctgatctccaacgacgactacctgctgcggcagaacagcagcgagaacggggtgctgccctaccagctgaacctgaacgagcggcggcggatcatcgagaaccagtccaagtactaccccttcctgtccaacctggacagcgacttctccgaccccaagaacaagtgcttccggatcgagagcatcctgaagtacaagatcccctactacgtggggcccctgagccccaaggccacccacaactgggtgagcatgaacaacgagtcccacgagcggatcaccccctggaacttctgggacatcgtgaaccaggagaaaaccgaggaggccttcatcgacttcctgaagaactactgctcctacctgatccacgagcccaccctgcccaagcagagcctggtgtaccagcggttcgtgctgctgaacgagatgaacacctggcagcggaacgggatccccctgtccaccgaggacaaggagtacctgatcaccaacctgtacctgaagcagcggaccatcaccaagctgagcaccatcgagaaggccctgcggatcaagtacaagaccaccgacatcaagatcaccaccagcgggaccaccaaggggaaggggatcaccgacgacgacctgcacgggaccctgtccagctggatcgacttctccaacgagaaggccttcgggcccgagctgttccacagcaagaagatccaggagatcgccgagatcaccatcaaggacgccaccctgttccaggacaagaaggtgaagcaggagcggctgaagcggttccacctgagccccagccagatcaagtaccggagcaacttccgctacaaggggtgggcccggctgagcaacaagctgctgaccggcatcaagatcagcctgcccaacgagccctacgactactccatcctggacctgatgtggaagaagtccctgaccctggaggagatcctcaagaccaaggaggaggacaaccccaagaactacaagtaccccttcctgctggagatcaagaaggagaacggggacgaccgggaggacatcgacgacatcctgtcccggctgcactgcagccccaagatggagcgggccatcttccagaccatcgagatcatcaaggagctgaagagcaccctgcacatcaagggcttcagcgagtacttcgtcgagaccggccgcttcaccggcgagaagaagcggaccaactcccggaagatcaagatcgagaacttctacaagggcatcgagaagcagctgtccgagagcgaccgggagggcttccagaccctgaagggccagctgaaggagttcaccaacaccaagctgaagaagaagaagtggtacctgtacttccggcagctggggaagtccctgtacaccgggaagcccatcgacttcaacaacttcgagaactacgacatcgaccacatcatcccccgggcccgggtgaaggacgactccttcaccaacctggtgctggtggagaagatccggaacaaggacaagtccaaccactaccccttcgtgaaccagtacgtggacaaggaggggatcgagttcatcaccttcctgaacaaggccaacagcaagatccggcccgacaagaagcggaaccggatcctgcgcaccaaggagctctccaacgaggagatctccgggttcgtgaagtcccagctgaccaccaccgaccagtcggtgaacgccgtgtgcaagatcctgaacctgatcgacaagaaggcccgggtggtgtacagccgggcctccaccgtggccgagttccggcagctgttcgggctggtgaagtcccgggacgccaacgacttccaccacgcccaggacgcctacctgaacatcgtggtgggcaacgtgtacgacaaggagttctcggacggcggcgtgcacgtgatcgcccacaagcgggactacatggagtccctgaaccggagcgtgaagtacatgttccaccacgacgagcgggtcctgaacaaggacaccctcatctggaagtccaagaactacatcatcggcaaggacggggaggagatcgaggaccccaactcccacgggaccatcgacatcatccggaagtacttctccatcaacgaccccctgatcacccggaagatggagcggaagcccaccctgctgttcagccagaacgagatcatctccgcccggaacggcggggcccagttccccctgaagcagtacaagcccttcaactccaagggcttcgagaccaagtacgggggctacagccacctgagcaacccctacgggatgctggtgaagtccgagggcaagaacaagaagcccatctacagcatcgagttcgtgccctcggtgtacctgggcaagcactactccgagatcaaggtgaagaagtacctgtccgagaacaagaagtgcaagaaccccgagatctgcatcaagcggctgcgcttcaacaccatcatcgagatcccgtgcatctcctccaccggggagaccggggtcctgcgggtgggcctggcctccggcaagaccaacgggcaccagatgggcctgatcaacatgaccgagcccaagatcgacaacaagtaccggtgcctgatcaagagcctgagcaagctggccgcctacgacgactccctgatcgccgagagcaaggacaagcagtccagctacgagaagtacgggatgaacgacatcgacgagaaccccaacgagaagatcaagcggaccgacctggaggagctgttcaagtacatcaccgaggtgctgtacaagaagcccgagttcgagtgcctgcccaaggtgagcaacaccctgctcgccctggagaccagcctcgaggagttcaagcagctgagcaccatcaaccaggtgcactgcctgtgctccatgctgaagatcatccaggccaagtccgtgcagcagatcaacttcaagaagttcgcggactccaacagcaacctgaccatcttcgagaacctgcccaagacctgcggcgacatcgtgcggaacaacgagctgcccagccacgccaagatcatccagaccagcgccaccgggctgaccgagtgggtgctgttcgaggtgcccgagaactga

SEQ ID NO: 227 - DNA, 4158 bp, synthetic construct
  source 1..4158: mol_type = other DNA
atgaaggagctgaacctgggcctggacatcgggaccaactccgtgggctgggccctggtggacgagaacggggaggtgatcaagaagaacgggttcaggttctggggcgtgcgcatgttcgacgagagcaaggccgcctccgagcgccggaccaaccggtgctcccggcggcggctgcgccgccggaagcagcggatcgagctgctgcagaacgagttccgcgacgagatcaacaaggtggacgccaacttcttccagcggatcaacgactccttctacaagatcgaggacaagtccatccagaaccactacaccttcttcgacgacttcatgaccgaccagaagtacttcgagaagtaccccaccatctaccacctgcggaagcacctgatcgagaccgacgagaaggccgacatccgcatgctgtacctggccatccaccacatcatcaagtaccgcgggcacttcctgaacgagaacgagaccttcaaccccaccgacatcaacgtgatcgccaccaagatcgacgagttcaacaacatcctggacgagctgtccaacaagaacgaggacgacgtggagtacttcgagaagatcaacaccgagaaggccaacttctacgtgaagctgcaggagatcatgatcgccaagaactccaagaaggagaaggagagcgacctcctgaccctgatggacatcaagaagtccaccctggccgcccagttcttcgtgaacctgctggtgtacggcaagaccagccccaagaagtactccctggtgaaggaggaggactaccaggtgaaggacatcgacttctcctccgacgagtacgagaccgccgtggaggaggccaagaaaaccatcagcgagctgtccgagatcttcgacttcgtggacgaggtgaagagcatcgccgactactactacctgctgaagctcctggggttcaacgagaaaaccaacgagtgcaaccagagcatctccgacgccatgatcaaggtgtacgacacccaccagaaggacctcaaggagctgaagctgctgatcaagaactacctgcccagcaagtacaacgagtgcttccgcctgtacgacgagaagatcaacaactacgtggggtacgtggggcggctgtccaccgagggcaagaccatccgcttcaagcactgctccaaggagacctttgagaagtacatcaagggcctcctggacaacatcaaggacgagaaggtccaggacatcatcctggacatcaagaagcggatcgacaacaacgagtacatgccccggcagaacaacgggcagaacacctccatccccatgcagctcaacctgagcgagctgaaggacatcctcagcaagcagagcaagtactaccccttcctgaaggagtccaccgacggcttcaccaccatcgaccggatcgagaagatcttcacctaccacctgccctactacgtggggccgctgtccaacaacagcaagttcagctgggtggagcgcaccagcgactccatcaagccctggaactacgagaaggtgatcgacatcgacaagaccgccgagaagttcatccagcggatgcagaacaagtgcacctacctgcacggcatcaacgactactgcctgcccaagaagtccctgctgttcagcgagtacacctgcctgcagtacctgaacaagctgaagatcaacgggtccaacatcgacaagaacaccaaggacaagatcttcaacgacttcttcctgaaggacaagagccccaccaagaagcggctcaaggagttcatcagctccaacttcggggaggagtgcaacgatctgcccgagatcacctgcaacatgtcctcctggatcgacttcaaggagatctacaaggaggacttcgacaagaagaaggacaacgagatcgaggagatcatccgggacatcaccctgttcgaggacaagaagatcctcgagaagcggctgaaggaggtgtacaagctgaacgacgacatggtgaagcagatcaagggcttcaactacaaggggtacggcagcatctgccggaacctgctggagctcacctacgagaacgagctgaccggcgaggtgtccgactccatcatcgacgtgatgcggaacaccaacatgaacctgcaggagctgatcctgtccaacaactccaagtaccaggaggccatcgacaagtacaacagcaacatcgacaacaagaacgacatgcagctggacttcaaggagtacatcgacgagaacctgtacgtgagccccatcatgaagcggcccctggtgcaggcctacaagatcatcgaggagatcgagcggatcttcaagcggcccatcgacaagtactacatcgagtgcgcccggaccaaccaggccaagaaggaggccaccaactcccgctacaaccacatcaaggacctgtacgccgcctgctccaaggaggagctgaagtccaaccagatcgacctgggcaacctgcagaagaagctggaggagaaccagaacaagctgcagatcgatgtgatctacctgtacttcacccagctcggcaagttcatgtacaccctgaacaacatcgacttcgactccctgaacaacggggacctgtacgacatcgaccacatctacccccggtccctgatcaaggacgactccatcagcaaccgggtgctggtggacaagaacatcaaccagaacaagaagaacaacctcttcctgtgccagaccgacatcgtgaaggagaagcagcggaagttctacaagctgctggtggacaacaagctgatcaccaaggagaagtaccggcggctgacggagaccaacgtctccgagaacacgctggacggcttcgtgaaccggcagctggtggccaccaaccaggccgtgaagggcctgatccaggtgctcaagaccttcaagaaggtgaagaacagcgacatcatctactccaaggccgagaacgtgagcgacttccggaacgagcacaacttcctcaagacccggaccgccaacaacttccaccacgcccacgacgcctacctgaacgtggtgatcggccgggccctgaactcctactacgagaagaactacatctacaacagcaacgacgtgctgaagatgcagaacgacaaaaagaccctgaacccccagcggatcctgaccttctccaacatcaccgacaagaacggcaactacgtgtgggggatcgacgagtacaccaagaagatcgagaagtacctgtaccacaagtacgacatccacgagaccacccgcacccacaccagcaacgagatgttcagcaagaccagcatctccaaggccggggaggggaccgtgctgatcaagagcaacgacaagaagctgaccatcgagaagtacgggggcatcaagtcctacagctactgcttctactgcatcgtgaaggccgtggacaagaagaacaacaacctgtactgcctcgaggccatccccaccccctacaagaacaacatcgacgcctacatctccaagaagtgctccaacaagtacatctcctacgagatcatcaagaagcagatccccaccaacgtggtggtgaagcagcagaacctgaagtacgtgatcaccggcaagaccaaggacagctacctgatcaagaacgtgaacgaccggttcttctccaagaaggccatcttcaccatccggaagatcgacaagtacttcgagaagagcaagttcaccaacctcgaggagaagaacaacgagatcgagatcgcccccagcaagaagatgaagaacaacaagatgagcaaccccatcatcatcaccaagctggagtgcatcgagctgatcgaggagatcaagaagctgtactccaaggacatctacagctactcccagatcgtgcgcctgtgcgccaccctgcagaacaccaacttcaacgagaacttcaacctgaaggacctgatgtccatcatctaccagatcctgctcctgctcaagaccaacgagcgcaacagcgccgacctgacgatgatcgggctgaagaagagcttcggcatcctgaccatcagcaggctggtgcccaagatgcgcttcgtgagcgagagcatcaccgggtacttcgaggagctgatcttcgaggtgcccgagtgccacctggagatgtga

SEQ ID NO: 228 - DNA, 4107 bp, synthetic construct
  source 1..4107: mol_type = other DNA
atgaacctgcggtccctgtccaccagcgacaagcagtactacatcggcctggacatcgggaccaactccgtgggctgggccgccgtggacgaggacggggacctgctgaagttcaaggggaagaacacctggggctcccggctgttcgactccgcctccaccgccgagaaaacccggagccaccggaccctgcggcggcggtacaaccgccgcctgcagcggatcctggacctccgggccttcctgtaccccgacgtggagaaggtggaccccgacttcttcaaccggatggggcagagcagcctgttcgccgacgacaggcagttcgaggagcagtacgtgctcttcaacggcgtggacttcaacgagaaggactacttcgcccggtaccccaccatctaccacctgcgggaggagctggtgaacaaccccgagaaggccgacatccggctggtgtacctggccctgcaccacatcatgaagtaccgggggaacttcctggtgtccggcgaggtgtccgcccgcaacgtggacgccgagaagatcgtggacgagttcctgaacgagctgtccagcctggccgagcggtacgacatcgccctggacgtggagtccatcgacgccaaggagatcaacgacatcgtgtccctgagcaaggagacccggcaggagcgccagcacaagctgaagaaggtgctggggttccccaaggaggccgacaagctggccacggccctgagcaaggccgtgttcggctacaaggccgacttcagcaagatcttcgaggtgggggaggagaccgagtcctccttcagcctcgggcaggaggacaaggtggagatcttcgagaagtccgccctgctggaggacgacttcggcctgttccgggccctgcagggcctgtacaggtcctacctgctgggcggcatcatcaaggaggcccccggcaggaccatctcctccagcatggtcgccctgtacgagaagcacaaggaggacctcgcccgcctgaaggacctggtgaagaagtacctgcccaaggagaagtaccgggagaccttcaagggccccaagtacgccgggggcacctacaagaaggccgggtccaagggctacaccgcctacctgctgaacaaccacgtgcagaacaagaccccggaggagaccttcttctcctacctggggtccctgttcaagaacgtggagatggacccggaggaccgggagtactgggacgacgccctgaagcggatgtccgagggcgagtacctgcggaagctgcggatgtccgacaacggggccatcccccaccagctgcacggcgaggagctgaagctgatcatcgagaaccagtcccagtactacccgagcctggccgagaacggcgagaagatcgaggccctgttctccttccggctgccctactacgtggggcccctggggtcccagaacaaccccaaccgggccaagcccttcagctgggcggtccggaaggagaacgcgccccaggagcccatcaagccctggaacttcgaccagatcatcgaccgggacgccaccgccgaggccttcatcaacaacctgaccgggacctgcacctactacctgggcaagtccgtgatccccaagtacagcctgctgtacagcgagttctgcgtgcggcaggagctgaacgtgtgcaaggccgccatcgacggcgagaagttcaaccggttcgacgtcaagaccgccaacgagatcttcgagggcgtgttcaagcggaagaagaaggtgtccatcaaggacgtctccgacttcctcaagaccgagctgggcatgttcaacgtgaccgtgaccggcacgcaggacgagaaggggttcgccagcagcctgacctcctacaacgacttcaggcggatcctggggcgcgagatcgagaccgcctccgactgcgagatggtggagaagctgatcacctgggtgaccgtgttcgaggacaagaagatcctccggcggaagatcacccagacctacggccccgaggccaccggggagctcaccaacgagcagatcaaggccgtgaccaagctgcggtacaccggctggtcccggctgagccgggagttcctggaggacctgcgggtggactacgagggcacctacgtgtccatcatggacatcctgcgggactcccggaactcccggcggcccatgaacctcatggagatcctggccgacgagcggttccacttccagaacctgctcgacgaggccaacaaggagttcctggacgccgcctacggcaccgccctggactccatccccgggagccccgccctgaagcggggcatcaaccagagcctcaagatcgtgcaggagatcgtgcagatcgcggggaagagccccgccaagatctgcgtggagatggccaaggaggacgtgggcaagaccaagggcaagcggacccggacccgccagcggcacatcgaggagtgcatcaacgccaacgtggaccagatcgtgaaggggatcaaggactccgaggagctcaagaaggagctccgggagaacgccgaccggctggacgagaccaagctgtacctgtacttcctgcagggcgggaagtgcctgtacagcggcgatcccctggagatcgacgagctggagaactacgacatcgaccacatcatcccccggtccctggtgaaggacaactccatcgacaacctggccctggtgacctccgagtgcaaccgcaccgagaagcgggacgtgtaccccctccccgaggccatccggcgccggcggctgggcgtgtggcgcgccatgcggcgcgtgggcatgctcagcgagaagaagtacgagcggctgacctgcgccaacgtgagcgacaagcggttccagcacttcatcaaccggcagctggtggagacccggcagatctccaagcaggtggtggccctgctgcagagccagtaccccgacagcaaggtggaggggatcaaggccgggctcaccagctccctgcgcaagacctacgggttccacaagagccggctggtgaacgacttccaccacgcccacgacgcctacttcgcctgccaggtgagccggttcatcagctgccggttccccacgatgggggagggcctgacctacgccgccttcacccggtacgacgccatcatggccaaggagcgctactccaaggtggggctggtggccagccagttcggccgggacggcttcgaccggaacaccggcgagatcatcaaggacacctgggacgcccagttcgagctggagcggatccggaagtgcctgaactacaaggactgcttcatcagccgcaagaccgaggtgctgagcggcgagttctggaagcagaccatcctcagcccccggatgaaaaccgagaaggccatcccgctgaagaaggacctggaccccgtgaagtacgggtactacaagtcccccaacagcgccttctacaccctgatcaagtgctccaagaccctgcggaagaaggaccgcaccgtggtggagctggtgggcatccccatcaacgtggccaaccggatcaactccaccgaggacctgcagaagtacctggagaccaggtacaacaagcccttcatcatccgggagcggatccccaagtaccagctgatcgagtgggacgggcaccggtactacctgaccagccagtccgagatgatcaacgcctggcagctgtggctgcccgagcagtacatcgggagcctggaggagatcgagccgccccggaacgagggcaaggtcctgcccgaggagaccaccagggccatctgggccctgctgatcaaggccgtggagaagaacccccggtacaaggacaacctggccatcaagctgaagtccgactccatccggcggaagttcgaggaggcctcccccaaggagaagcagaagaacgtgctgcagctgatcgccctgctgcactgcaacgccgacagggggatcagcctggtgtccaccagcgccgggcgcatgaacagcgtgagcttcgagtccaactacaagcacatccagttcgtggacaccagcgtgaccggcatgtacgagcgccggaccaacatcgagctgtga

SEQ ID NO: 229 - DNA, 4086 bp, synthetic construct
  source 1..4086: mol_type = other DNA
atgaaggggatcatcatgaacgccaagcggtccgagtactacatcgggctggacatcggcaccaacagcgtgggctgggccgtggccaaccccgactacaccatccccaagttccacggccacaagatgtggggctcccggctgttcgacgaggccatgaccgccgaggagcgccgggtgcaccgcaccaaccggcgccggctgaaccggcgccgggaccgcctgaacatcctgcaggacctgttcaaggacgagatcgcccaggtggacaacaccttcttcctgcgcctgaaggagagcaagttctacctggaggacaaggacgaggcgatcaaggacaagaacatcctgttcagcgacctgaagttcaccgacaaggacttctacaagaagtacaagaccatctaccacctgcggaaccacctgatgaacgagtccccggacgacatccgggagctgtacctggccatccaccacatcctgaagtaccggggccacttcctgctgtccggggacctgggcatcagcaacgagagcatcgccgacagcctggagtccatcttcgtgaacctggacatcctgcagcccggcgaggagttcgatctgaacctgatcgactccatcctgaagaaccgggacaagaccaagagcgacaggcgcaaggccgtgaagaaggtggccgaggagcactgggagagcaacaagaaggagcagtccgtgaagaacaagatcgcccagatcgacaacatcgccgggctggccctcggcctgaaggccgacctgtccaagctgctgaacgtgcccgagtacaccgacctggagaaggcctacaaggagatctgcttctccaagggcgactacgaggagaagcggggcgactacgagctgtccatcggcgagtacatcaagatcatcgaccagatcaagaccgtgtacgacagcatcatcctgtcctccgtgctgaaggactacgccaccatcagcgaggccaagatcgccgactacgaggcccaccaggacgacctgcagcacctgaagaagctgctgaagcccaccccctccctgtacaacgccatgttcagggacgacagcaacaagtccctgaacaactacgtggcctacatcggggcctacaccaacgggaagcggacctccaccgaggacttctacaagttcgtgaagaagtccctggccgagctggaggacagcgtggagaaggagcgcgtgctgaaccgcatcggcctggagcagttcatgcccctgatgcggtccaagaacaacgcctccatcccctaccagatccacaaggtggagctgatccagatcctggagaaggccgcctccaagttccccttcctgaacgacgtgaaggacggcctgagcgtgaaggagaagatcatcgagctgttcgagttccggatcccctactacgtggggcccctgaacaacagcaactccaacaacgcctgggtggtccggaagtccaccgggaaggtgtacccctggaacttcaacgagaagatcgacgagaaggcctccgccgaggccttcatcaacaacctgaccaacaagtgcacctacctgatcggggaggacgtgctccccaagaacagcatcctgtacagcaagttcagcctgctgaacgagctgaacaacatccggatcgacgggcagcccctgcccgtccaggtgaagcaggactacatcgacaccatcttcaagaaggagcacaagaagcagaccaagtcccgcatcctggacttcctgaagatctccggcctgatccccaacagcatccccgtgtccgtggtgaccgggctggacgactccatcaagtccgacctgaagtcctaccgggacatggagaagatcctgggggagggcttcgacatcagcgtggccgagaacatcatccgctgggtcacgctgttcggcgaggccaagcggatcctggtggacaagatccgcgagaactacccccagatcaccgacgagcagatcaagaagatcaagaagctgaagtacagcgactgggggaagctgagcaacaagttcctgctgaagatcaagtgcatcacccccgagggggacgagaacagcatcatcgacaccctggagaacaccaacctgaacctgatgcagatcctggccatcaagagctgccagaagaacatcgagctgtggaaccaggagcacaccgagaacaaggagtacaagaccgagtacgacctcctggacgacctgtacatcagccccgccgtgaagcggagcgtgtggcagtccctgaagatcgtggacgagctggtgcggatcaacgggtccatccccaagaagatcttcgtggaggtgacccggaccaacaaggccgagaaaaccaagaaggacgcccggcagaagcggctgctggacctgtaccaggccatcgggaaggagggggccgagtggaaggagcagatcctgaactacaacgccggggacttccggagcaagaagctgtacctgtactacacccagatgggccggtgcatgtacagcaacgagctgatcaacatcgatcggctcttcaccaacgactacgacatcgaccacatcttcccccggtccgtgaccaaggacaacagctgggacaacctggtgctcgtgaagtccgtggagaaccgcaaaaagacggacacctaccccctgcccatcgagctgcagaaccgcaacaaggagtggtggcgcatgctgcgccagtactccttcatcagcgagcggaagtacgagcggctggtgcggaaggaggagctgaccgtcgaggagctgtccgggttcatcgcccggcagctcgtcgagacctcccagagcaccaaggccgtgacccagctgctgaagaagatctaccccgacaccgagatcgtcttcagcaaggccgagaacgtgagcgagttccgctacaagaacaacttcgtgaaggtgcgcgagctgaacgactaccaccacgccaaggacgcctacctgaacatcgtggtgggcaacgtgtaccacgagaagttcacgaaggacccctccaactacatccggaacgtgtacgaccggttcaacagcatcaacgaccggcggaagcgcctgtccatgaaccacatcttcgtgcacaagctggagcggcacaacaccaccatctgggaccccagcatctccatgcccatcgtgatcaagatgatggagagcaacgacgtgcgggtgacccgcaagctgaccatccagaagggggtgctgtacaacgccagcatcaccaaggccaacaaggccaagttcgacagcaacttccccctgaagcggggcgaccagcggctgctggacgtgagcaagtacggcgggtacgagaacatctacaacgcctactactccgtgttccgcttcatcgacaccaagctgaagaaggagagcgtgaacctgatcgccatccccatctacgtgctgaactccctgaacagcaacgacgactacatcctgtacgccaagtccaccatcagcaaccggaacaactacgaccagatcgagctgctgtacaagaagctgcccatcaacagcctggtgcggatcaacggcttcgactactacatcggcggcaagaccaacaacaacgtgtgcatcgacagcgccatcagcgtggtgctgaacagcagcgacctgctgtacctgaagtccatcatccgggtggtgaacagcgacatccccgagcacgtgttcaagatggacgacagcctgagcaaggacgccaacctgcggttctaccgcagcctggtgtccaagatgaagcagagcatcttcatcaagaagagcaagaacaagttccgggagctggagcaggacagctgcatctgcaagttcatcaccctgaccgagatcgagcagtgctacgtgctgctcgacctgctgaacatgctgaccaacaaaaagaccacctacgacaagctgaacaagtgcctgggggtcagcatgagcaggtccacccaggggatgaacctgagcaacctgaacgagttcaccatcaaggagcagtccgtgaccgggctgtactgcaaggacgtgaagctgatctga

SEQ ID NO: 230 - DNA, 4044 bp, synthetic construct
  source 1..4044: mol_type = other DNA
atggaggactggtacctgggcctggacatgggcaccaactccgtgggctgggccgtgaccgacgaggcctactgcctgctgcggaagaagggcaaggacctgtggggcgtgcggctgttcctggaggccgagaccgcccagggccggcgctccaaccgggtgtcccggcggcggcgccgccgggagaccgtgcggatcggctacctgaaggagctgttctccgaggccatcagccaggtggacgccggcttctaccagcgcctggaggacagcaagttcttccaggaggacaagcgggagcaccagcccttcgccctgttcgccgacaccgcctacaccgaccgggactacttcaaggagtaccccaccatctaccacctgcggcgggagctcctgtacagcaaggagccccacgacgtgcggctggtgtacctggccgtgctgaacatgttcaagcaccggggccacttcctgaacgccaccctgtccgacgggaacgggggcaacatcaaggagctgtacggccagctgcaggaggggttctccgagctgtacgacaaggagatggccgccatccgggacgccgaggagctgcagaagctcctgaccgacaagaagtacaccaagtccgggcgggccgaggaggtgcggaagtacctcaacatcgacaagaaggacaaggcccagtgcgagatgtggaagctggtgtgcggcctgcaggccaccctgcccgtgatcttcgagggcgaggagttctccgaggagaacctgaagtacaagctgtccttcgacgacggcaagtacgaggagaaggccgccgaggtggagggcatgctctccgaggacgccttcgagctgttcctgctgctgaagcagatccacgacggggtgatcctgtccgacatcatggagtcctaccactacctgtccgaggcccgggtggccagctacgagaagcacaaggaggacctgaagcgcctgaagaagatctacaggctgtacgcccccgaggagtacgactccatgttccggacgatggaggacaacaactactccgcctacgccggcagcttcctgaccggcggcgagaagcagcgccggggcgggaagcacaagaccgaggagttctacgcccggctgaagaagaagatcgtgaccttccccgagaccggggactcccggtacgtgctggacgagatcgagaagggcaccttcctgcccaagcagctgaccgcctccaacggggtgatccccaaccaggtgcacctggccgagctgaagaagatcctggagaacgccgagaactacctggagttcctcaagaccaaggacgagggcggcctgaccgtctccgagaagatcatccagctgttctccttccagatgccctactacatcgggcccctgatccagacggagaacaaccacgcctgggtgaagcggaaggagatgggcaaggtgtacccctggaacctggagcagaagatcgacgtgaaggagaccgccgaggccttcatctacaacctggtgaaccactgcacctacctgagcgacgagcgggtcctccccaagaactccctgctgtacgagaagttcatggtgctgaacgagctgaacaacctccggatcaacggggagaagatctccgtggagctgaagcaggagctgtaccaggccctgttcaagaacggcaagaaggtgaccggcaagcggatcaagacctacctgctgaaccgggggtacgtgtccaaggagatgcccgtggagctgaccggcatcgacggggactgcgtgaaccgcctggccaactacaagaagttcctggagatcttcgaggtcgacaccctgacctacgcccaggagcagatggccgagcagatcatctactggtccaccgtgtacggcgacagccggaagttcctgggcgacaagatcgaggaggagtacggcaaggtgctcacccccgagcagaagaagcggatcctgggctacaagttcaaggactggggccggttctcccgggagttcctgttcctggagggcgccgacaaggagaccggcgagatcgacaccatcatctcccggctctggaacgagaactacaacctgatgcagctgctgggggacgagctgttcacctacaaggaggagatcgagaagcgggtgcagaagatcgacaagaccctcttcgagatcgagtacgaggacctccaggagctgtacatcagcgcccccgtgcggcggatgacctggcagaccatcctgctgctgcgggagctgtgctccgtgatggggagctaccccaacaaggtgttcgtggagatggcccgcgagcaccaggaggacaagaagcgcaccgtgtccaggaagaggaagttcgaggagctgtacaagaagtgcaagggggaggagcgcgagtggctggccgagatctccgggaccgaggagtcccggttccggagcaagaagctgtacctctactacacccagaagggccggtgcatgtacaccggcgagcagatcgagctgagcaacctgttcaacgacaacctgtacgacatcgaccacatctacccccggcacttcgtgaaggacgacaacatcgacaacaacctggtgctggtgaagaaggagtccaacgcccacaagcgggacgtgttccccctggagcccggcatccgggagaagcagaacgacctgtggaagatgctgctggagggcggcttcatcaccaaggagaagtacttccggctgacccggaacgaccccttcacccccgaggagcaggccggcttcatcagccggcagatcgtggagacccggcagggcaccaaggccatcgccgacctgctccagaaggggtgccccgacagcgacgtgatctacgtgaaggccgggaacgtgtccgacttccggcacgagttcaacctgatcaagtgccggaacgtcaacgacttccaccacgcccaggacgcctacctgaacatcgtggtgggcaacgtgtacgacaccaagttcaccaagagcccccggcgcttcatcgaggcctaccggaaggaccccgagcacaacaagtaccacatggacaagctgttcgacttcgacgtgaagcgggggaacgtggtggcctgggaggtggggaagtccatcggggaggtgaaaaagaccttccggaagaacagccccctggtgacctacatgaactacgaggcccacgggggcctggccgaccagaccctgtacagcgccaaggccgccaagctggccggcggcgaggggtacatccccctgaaggccagcgacgagcggctgaaggacaccacgaagtacgggggcttcaagaagtacaccgggtgctacttcttcgtggtggagtacaccgtgaaggggaagcgcatccggagcatcgagaacatgcccctgtacctgaagaaggagctgaactcccgggagaagctggagcagtactgcatggaggtgctgaagtacgccgagcccgagatcatctgcgagcggatcaagatgtactccctgatgaagatcaacgggtactacgcctacctgtccggccggaccggcaaccagctgatcctggtgaacgccgtgcagctggtgctgtcctacgactggatgctctacgtgaagcggatcaacgacgccgtggagcgcgggtactccgaggagcagctggagtaccagggcgagatcacccgcgagcagaacctgaagctgtaccgggagctgaccggcaagcacatgggcaccatctacgggaagcggcccaacggcatcgggaagttcctggtggagaacgaggagaagttcgagatgctgagcatccagcagcagctgtccgccctgctggagatcctgaaggtgtcccagcggacctccggcggggtggacatgacgatgctgggcggggccaagaaggccggcgtgtccctgatctccaagaagatcagcgacctgaaggagtgcaaggtgatccaccagtccgtggccggcctgtacgtgtccgagaccgacctgctgagcctgtga

SEQ ID NO: 231 - DNA, 3948 bp, synthetic construct
  source 1..3948: mol_type = other DNA
atgtccgagtactacatcgggctggacgtggggaccaactccgtcggctgggccgccaccgacaccgcgtacagcctgctgaagtaccggggcaacgccatgtggggcgtgcggctgttcgacgacgccaacgacgcctccgagcggcggagcagccgcaccgcccggcggctgcacgcccggagcaagcagcggctggccctgctggagctgctgttctccgaggcgctggccgagaaggaccccctgttcctgacccggctggccgagtccgccctgcaggagcaggaccggtcctccgccagctgccggtacgccctgttcaacgaccccgacttcaccgaccgggagtacttcaagcggtaccccaccgcctaccacctgcggagcgagctgatccacagcaccgctccgcacgacatccggctggtgtacctggccctgcaccacatcgtgaagagccggggccacttcctgttcgacatggacacggacggggagtacaagggcgtgcgggagatcttcgacgagctgtgcgtgctgctggaggagcagtacgacacagcctgccccgtgtccgacaccgacgccttcctggagctgctccagaacgactccatgggcatcaccgacaagaagaaggccctgaagcccctggtgggcaagaacgccgccgacatggtggacggctacgtgctgtgctgcgccctggtgggcgccacagtgaagtgcgccgacctgttctgcgacgagaccctgaaggacgtcgacatccccagcctgcggctgcgggacgacctggacgagaactacgaccggttcgccgacgccctgagcgaccggatggacctggtcgtggccatgaaggcggtgttcgacgccgccctgctgtcgaagatcctgggcaaggccgcccacaccggcgacgagaccgcctacatctccgacgccaaggtgcagcagttcgacgagaaccgggccgacctggccctgctgaagcggtacgtgcggtccgcctgccccgagaagtacggctacatcttccggaagaagaaggacaagctgaacaacttcgccgcctacggcaagcggagcatcgccagcggcgagtacacctgcaagcaggaggacttctgcaagttcctgaagaaggagctgcccgcccccagcgaggcggcctacgccgccctgttcgccaagatcgagaacggcaccctgctgcccaagctgcggggcgccgacaactccgtgatcccccaccagctccactaccgggagctgaagaagatcctggagaacgccgccggctacctgcccttcctgcagcaggccgacgccgacggcctgaccgtgacggacaagatcctgagcatcttcagcttcaggatcccctactacgtggggcccctgaacctgaagagccccaacgcctgggtcgtgcggaccgaggagaagatcaccccctggaacttcgagaaggtggtcgacacccagaagtccgccgagtccttcatgatcaggctgatcggcaagtgcacctacaccggcgaggccgtcctgcccaaggacagcctgctgtacagcgagttcgccgtgctgaacgagatcaacctgctgtgcctgaacggcacgcccctgcccgccgacatcaagaaccggctgttccaggacctgttcgtgcagagcaacgcccgcgtgaccaagaagaagatcaagcagtggctgctcatgcacgggctggccaaggagaccgacgaggtgagcggggtggacaacatcatcaaggccaacctgaagtcctaccacgacttcaagaacatcctgtgcaaggtgccccacgccgagatcgtggaggacatcatcaagcacatcctgatcttcggcgaggacaagaagatgctccgccgctggctgaaggccagctgccccttcctggacgagcaggacaccgcctacgtgctgcggctgcggtacaaggactgggggcggctgagccggaccttcctgaccgagatctacacccccgacgagaacggggaggccctgagcgtgatggacatgctcagggccaccaacaagaacctgcagcagctgctgaccgacgactacgacttcgccaagcaggcggaggagtaccggtccctgaagttcggggtcggcggcagcctggacgagcagctgcaggacctgtacatctcgccccggatccaccggagcatccggcagaccctgaagatcgtgaaggagatcaccgccgccgagaagtgcgcccccaagaagatcttcctggaggtggcccggggcaccaaggaggacctgaagggcaagcggaccgtgagccgcaaggacaacctcctgcagctgtacaaggcctgcaaggaggagcacggcgagctggccgccgccctcgccgccgaggacgagggccggctgcgcagcgacgccctgtacctgtactacacccagttcgggaagtgcatgtacagcggcgagtccatcgacatcaccaagctgaagtccgactacgacatcgaccacatcttcccccagagccgggtgaaggacgacagcctggacaaccgggtgctggtgaagcgggagctgaacaacgacaagaagaacatctaccccatcagcgccgacatccggaccaacatgcagcccttctggcacatgctgaaggagaaggggctgatcagcccccgcaagtacgagcgcctggtgcggaacaccccgctgaccgaggcggagctgtccgccttcgtgtcccggcagctggtggagaaccggcagtccaccaaggccctggccaccgtgctgaagcggtactaccccgacacccggctggtgtacagcaaggccatgaacgtgagcgacttccgccacgagcaggagctggtgaagtgccgggacatcaacgacctgcaccacgccaaggacgcctacctgaacatcgtggtgggcaacgtgtacgacaccaagttcacggccgccttcttcaagaacatcctgaccgaggagtacagcctgaacaaggtgttcgagcgcgacgtgcggggcgcctggcagaaggagcgcgacctggccaaggtgcgctccgtgatgaagaagaacaacatcctggtgacccgcatgccccacgagaagaaggggaagctgttcgacctgcagatcctgcccaagggcaagggccagctgcccgtgaaggtggaccggtccatcgagaactacggcggctacaacaacgtgagcggggcccactccatcgtggtggagcacgacggcaagaagggccgcgtgcgcaccatcgagcccgtgtacatctaccagaaggccctgtacgagcaggaccccctgcggtactgccgggagatcctgggcctgagcgagcccaagatcgtggcggaccgcatcctgttcgacaccctgctggagctgaacggcaagcggatctacatcaccggccggtccgggaactacctgtgcggcaagcacccctaccagctggccatcgacagcgacagcgagaaggccatcaaggacatcaagaagtacgtggaccggtgcgccgagaagaaggccgtgctgcccatcaccgagcacgacggcatcagcgccgagaccaacctgcggctgttcgacctgttcatcgccaagttccacgcccccgtgtacgccgcctacttcaccaacctgtgcaacttctgcgagcagcaccgggaggacttcatcgccctgacccccgacgcccagtgccacctgctgctcgagatcctgaaggccttcaagtgcgaccgcaccgccagcgacctgagcgtgctgggcggccccaagaacgccggcatcctgatgatgtccaagaccatcagcacctgccggaccgcctacgtgatccaccacagccccagcgggctgtacgagaccaaggtggatctgctgcggccctga

SEQ ID NO: 232-240 - skipped (9 entries)

SEQ ID NO: 241 - DNA, 3234 bp, synthetic construct
  source 1..3234: mol_type = other DNA
atggccccaaagaagaagcggaaggtcgggctcatcctggggctcgacctcggggtgagctccgtgggcttcgggatcatcgaggaggacacgtacaacatcgtggactacggcgtccgcctcttcgacgaggcggacgccaacaacaacctgaagcgccgcacgatgcggggcgcgcggcggctgaagagccgcaagcgcaaccgcatccaggccctcaagtactacctgtgccagatcggcctggtgaacaccatcgacttcgagaagctcaacaacgtctacgagctccgggtgaaggggctcaacgagaagttgagctccctggagctcgtgaacgtgctggtgaacatcgccaagcaccgcggcgtcgcctacgacatcgcgatcgacgagaaggacaaggaggccgaggccctgtcctcggccctgtccctcaacacgaagtcgctgagcaaccagcagaagtacgtctgcgagatccagttcgacaagctgaagaacggggagaagctgcggacgacgaacaacctctacaagtcctgcgactacgagaaggagctgcggaagatcctctcgaaccaggacttgaagccggaggacatcgagaagatcgtggacatcatcttccggaagcgggagttctcggagggcccggggagcgagaagttccccacgccctacgggagctaccgctggatcgacaacgtgctccagcacgtgaacctgatcgaggtgatgcggggcaagtgctcgatcttccccgaggagtcccgcatcgccaagtgctgctaccaggcctgcctgttcaacctcctcaacgacctgaacaacctcaccatcctgaagaacggggagaaggtgaagctcacgaaggaggagaagcagaacgtgatcgacgtgatcaacgagaagggccacatcacccccaagcagctgatgaagaagctgggggtggacgaggagcacatctcggggttccgggtcgacaagaacaacaagcccctgctgaccaccttcgacatctacgagaagatgttgaagctggagctcaacagcgacttcatcaacgacaagaacgagatcgaccaggtcatcgaggtgctcaccaagacgatcgtggtcgggaagcgcatggaggagctcagcaacctcgacatcaagctgagcaaggaggagatcgagaagctgagcaccctgaccaaggtcaacgggtaccacagcctgagcaagaaggcgatggacatcctcatcccggagctcctgagctccaacttcaaccagatggagctcatccacaacaacaacctgttccagaacaagctggacttcagcacgaagaacatccccttcgacgactcgtcgatcctgagcccggtcgccgtgcgggtgcacaagcagaccctgctcatcgtgaacaagctccgggaggagtacggggagttcgcggcgatcgtcatcgagacgacgcgcgcgaagaactcccaggaggagaagcgggaggagatcgagaagcagaagaagttcgaggacgccaagacgatcacgaacgagttcctcttcaagaagggcctgaacccggagaaggtgaacaccaacaccaagctgaagctccggctgtacaacgagcagaacgggaagaccatctactccggggagaccatcgacctggacctgctgctcaacgacgacaaggcgtacgagatcgagcacatcatcccgttctcgatctcgttcgacaacagcctgaacaacaaggccctggcctcccaccaggagaaccaggacaaggggaaccactccccgtgggggtacttctcgagcggcaaggtcgaggggccgaacgactcctgggagaagtacgtggccttcgtcaacgtgctgaacctcaacccgaagaagaaggagaacctcctgcggcaggaggacatcaccaagtacgagaaccggaagtcgttcatcaaccggaacctgaacgacacctcgtacgggatccggacggtgatgaacaccctgaagtcctacttcaaggccaaccagatctcgaccaacgtcttcaccatcaaggggaagatcacctcggccttccggggccgggtcggcctcaagaaggaccgggacgagtacatccaccacgcgatcgacgcgctcatcatcgcgtcgttcaagaaccagaagacgttctacgaggccttcgagctcgggaccaccgagcagggggacctctaccacctccagacgggggagctgttcgacctggagaaccccctggaggacagcaagctgctgaagttcatcagcaacctgaagaacatccacgggatccccaacgacttctcgtacaaggtggacacgaagacgaaccgccagttctcggacgagaccatctactcgacccggaagtacgaggacggcgagtacgtcatcaagaagtacaaggacatctacgggaaggacgacggggagaaggtgaagaagctgttcgagaagaacgaggccacgaagctgctcgtctaccggaacgacaagcagaccttcgagctcctggagaagatcgtgaacgcctactccaacgagaagaacccgttcgcgaagtacaaggaggagcacgggtacatccggaagtacagcaagaagggggacgggcccatcatcaagcagctgaagtacgtggacgggaagctggggaactacctggacatcacccagaagtaccccaagaccaacgacaagaaggtcgtcctcctgcagaacaccccgtaccggacggacttctacatctcgaaggagggcttctacaagttcctcaccatccggcgcttccacatcaagcagatcgacggcctgaacgtgatcgactacgacctctaccagagcctgaaggagaacaagaagatcacgctcgacgacgagtacctgttcaccctgaacaggaacaacatcatccacatcgtgggcgagaaggacgagtacttcaagttcatcgccaccaacaacgacatcaagaacatcatcgaggtgaagcgcatcgagcggctcaccgagaagcagatgatggtgtcgatcgggaagaaggtgaagaagatcgagaagtacaacgtctcgcccatcgggaagtaccagaaggtcgtcaaggagaccctgaagctggtgtggaagaaacgacccgccgccacaaaaaaggccgggcaggcaaagaaaaaaaaggattacaaagacgatgacgacaagtaa

SEQ ID NO: 242 - DNA, 3426 bp, synthetic construct
  source 1..3426: mol_type = other DNA
atggccccaaagaagaagcggaaggtctcgaagctcgccatgggcatcgacatcgggatcacctcggtgggctacggggtgatcgacctcgacgacgggaagttcatcgactacggggtccgcctcttcaaggaggggaccgccgaggacaacgagaagcggcggaacgcccgcgggcgccgccgcctcacgtcccggcggcacacccgcctccgggacatgaacaaggcgctggagcagttccagatcaaggggtcggactaccaccccttgagcaacgtgtacgagctccggtgcaaggggctgaaggagaagctcacctgcgacgagctcaccgcggtgatcctgcacatcacgaagcaccgggggagcaccctggacgtggtggaggagaacgaggcgaagaacgccgacatcctctccaccaaggagatcctccggaagaacgacgaggagatcaagcaggggaagttcatctgcgagatccagatggagcgcctgctgatgaaccacagcgtccgggggcacgccaacaacttcacgacgaaggactacgtctcggagctgcaggagatcctgaagcaccaggacctgtccgccgaggcgatcgacgcgatcatcacgatcgtgcagcggcggcgggcctactacgagggcccgggctccgagaagtcccccacgccctacgggcgcttcatcgaggagaacgggggcgtggtgcagatcgacctcatcgagaagatgagggggaagtgcagcgtgttcccggacctggcgcgggcgcccaagatgtcgatctccgcggagctcttcaacttcctgaacgacctgaacaacctggtcgtgaacggggagaagctctccgtggaggcgaagcaccagatcttctccatcgtgaacaagaaggggaagatcacgctgaagcagctcgccaagtgcctccaggtggaggagagcgacatcaagggctaccgcatcgacaagaaggacaaggcccagttcacggagttcaagggctacaagaagctcaagcagctctgccaggaggacgggctggccgtgtccctccaggactacgagatgctcgacgagatcatcgagatcctgaccaagaagaagggcatcgaggagcgcaaggaggcgctcaagggctcggtgttcgggatgtcggactacctcgtcgacatcctcgccgaggccaccggcatcaccgggtaccacgccctgagcctcaaggcgctccggatgctgaacaaggagatgttctactccgagttcaaccagatgcagctgctccaccagctgaacctgctgaaccagaaccggatcagctacaaggggcagcggaacatcacggcgaacgccgacgccatcctctcgcccgtggtgaagcgggcgcagaacgaggcgttcaaggtcatcaaccagcttcggaagaagtacggcgagttcgacaccatcgtcatcgagatggcgcgggacaagaactcgaacgagcagaagaagcggatcaacgacatgcagaagcgccgggagaagtcccgggaggagatggacaagatgctcaaggacctgggctacgacctggacaagatcaactcgaagatccgcatgaagctctcgctgtacgagcagcaggaggggaagtcggcgtacaccttccagccgatcgacctcaagcggctgatcaccgacccgaagtacacggagatcgaccacatcatcccgatctccatcagcctcgacgactcccagaacaacaaggtgctcgccctgcagtcggagaaccagatgaagagctacctgacgcccttcatggccttccaggccaacaagttcgccgacatgacgtacccggagtacaaggcccgggtgctgtcgaaccccaagtacagctacaagaagaagatgaacctgctgaacgagtccgacatcacgaagatggacgtgaagaaggacttcatcaaccggaacctggtggacacgcggtacgcgtgtcgggtggtgctcaacaccctgaaggactacttcaaggacaacgagatccacaccaaggtgcacacgatcaacgggcagctgacccacctgttccggcggaagagccacctggacaaggaccgggaggagaacttcctccaccacgcgatcgacgcgctcatcgtggtgtcgatcaagaagctccagctcgtgaacaactacctgttcctgagcgacatggagaaccaggggaacggcgggaacgagaccacgtcgtcgatcccgtcggacgagcagttctacgaggagcactacctccggtacatctcggacctgcggacgctgtaccagcagtcgtcccagtactacaaccggctgatcagcctgtccgacatgatgtacgccccgatcaagatcagccacaagatcgacacgaaggcgaaccggcagttcgccgacgagacgatctacagcacccggaaccgggacgggatcgactacgtggtcgagaagatcccggacatctacgaccccaagtcgaagaagtgcaaggcgctcgtggagagcatcctcaaccacgacgaccagaagtacctcatggcgcggaacgacccgcagaccttcgcgatcctcaaggagatcgtgcagaaccactacgtgatgtacaagcaggacgagacctggtacggggtcaagaacggcaagatcgagctcaagggggagaaccccctggcgggctacaagaaggagcacggcttcatcaagaagtacgccaagcggggcaacggccccgccatcgtctcgatgaagtacgagagcgagaagctcggcgtgcacctgctgatcagccggaactacgacctcaaggacaacaagaaggtcgtcctccggcagatcagcccgtaccggacggacttctaccactgcgacgacgggaagttccggttcgtcacggtgcggtacgcgaacgtgaagtacgacaagaaggagaagaagtacgtcatctccaagcagtggtacgaggacgagatgcagaagaagaacatcaagtcgacggacgagttcctcttctcgctccaccgcgacgagctcatcgggatcatccggaagcagggcgactcgtactactacgacgcctccaccgaggggaagggggacaagcagtactccgacgggatccaccccgagatcctgaagttcacggggaccaacaacgacgccaagggcgtcatcgaggtcaagcccatctacgcctactgcaagaagcagctgatgcccagcatccagagcgtggtgggcttgaagaagttctcgacggacgcccttggcaacctctacgaggtgaagaagaacaccctcaagctggagttcgacaaacgacccgccgccacaaaaaaggccgggcaggcaaagaaaaaaaaggattacaaagacgatgacgacaagtaa

SEQ ID NO: 243 - DNA, 3552 bp, synthetic construct
  source 1..3552: mol_type = other DNA
atggccccaaagaagaagcggaaggtcgacaagaagatcaaggtcaacatcggccttgacatcgggatcacctcggtggggtggtccatcctcgacgaggacaacaacatcctcaagctgggggtgcggctcttcgacgacgtcgccaacgagaaggacggcaagctggacaacgtccagcgccgggagtgccgcacccagcggcggcgcatccggcgggcccgcacccggaagcaggcctacctgaactacctggtgtcccagaactggttcaactcgtacgacgaggccgtggagttcatcacgaacttcgacctgatcaagttcgggtacgacaaccccatcgagctccggatccaggccctggagaacaagatctccaaggacgagctgatcttcctgctcttccactacctccaccaccgggggtacctgtacatcacggagtcggacgccgacaagctgaacgagaacgacgagaacaagaaggagttcccgtcgctcaagatctacaagttctacaagaactacgagtactacaagggctcgatcgtcagcgacaactcggcgtacgacttcgcgaacgagatccggcagatcctcaacatccaggggatcgacgagaacttcgcgaactactacatcaacgagctgttcctgaagcaccgggactacagccaggggccggggtccgagaagagccccaccccctacggcatgtggtactgggacgacaaggagcagaaggtgaccaagcgggagggggactccctctgggactccctcgtcgggaagtgctcctactaccccgacgagaagcgggggctggccaagtccccgatcgcggagatcttcaacctgctgaacgacatcagcaacatctacttcatcaacaacagcaacatcaagctgacggaggacgagcggaacaagatcttcagccagtacaacaacagcctgctgaagaccaagtccttcaacctgaccccgaaggagctgctgaagatcctgcagctcaagtgtcaggaccagaacatcgacgagtccgacatctacgggtaccgggtggacggggacaacaagaagatcatcacggagctcaagaactactgccagatcatccggtgggccaaggagtacctcgtcaacaaggacgagatcaacctgttcaacctggagatcctgaacttcgcgaacaacatcttcgtggagctgtccaagacgcaggacctcaagaagcggctggagatcctgaagaacatcaagtccaagctgctgaacgagaacaagttcacgaacatcgactccgacaagtcctacaacctggacatcaagctcatcaagggcctgaaggggctcacgaagacccacaccctcagctacaaggccatggaggagttcatcaagttctcgctgtccaacggcagcgagaacttgaactggatgcggtacagcaacttcaacaagaacctgaacaacaccaaccagaagaagtcctccaagtacctgaagaagatcgaccgcgaggaggtgatctcgcccaccacccggcgggcgttcaaccagacgatcaacgtcctgaacaagatcctcaagctgtactcgaacgagtacgagatcaagaacatcaccgtcgaggtggcgcgggacaagaactcctgcgaggagcggaaggtcatcacctcctcgcagaacaagaaccggaaggaggtcgaggagatcctcaagaacatcgggaacaagaagttcgaggatctcaacgcggcccagatcctccggatcaagctgtggaaccggcagcgccagttcgacatctacgactcgaagctcggcgagaacgagtcgaagatctcgttcgacgacgtgatcaacgggaacaagctggacatcgaccacatcatcccgtacagcatctcgcaggacgacagcatcaacaacaaggtgctgacccgccgggagaacaaccaggtggacaagaagcagcagaccccctaccagttcttctcccagctggggaagtgggacgactacaaggagaagatcgagaagttcttctccgacaagctgaaggagaagtggatcaagaacctgctgtacatcgggaaccccctgacggacatcgactcgttcgtcgggcggaacctgagcgacacccggtacgcctcccggctggtgctcaacgtcctgcaggagttcttcaagaacaacaagaactacgggaacaccaagatcaaggtgatccggggcgggatcaccaacttcgcgcggtacaacctcttcaccaacggggcggggaagtccctgatcccgaagaaccgggacatctactgccaccacgcgatcgacgcgtcgatcgtgtcctacctggggtccaaccacaacatcaagctcctgctgaaccacgcccagcaggagtacaacgacctcaagaagaagaacaacttcgagatcgacgaggacaagcgcctcgtcaacaaggagaccggggaggtgatcgagtcgtggtacgccaagaacggcgagtcccggctgttcgccgagcagctgaagcagtacaacacgatctacaacaagtccgaggggtgcctcatccccgggtccaagagcaacgagatcaagttctcgcggatgtacatcaacaagaacaacgtccagctctccaacgagacgatctactcgttccggttcaagaaggacgagaacgggaaccagctggacgacgggatcatcatcgactacatcaaggtcctggagtccaagacgtccgacctggagaagtacttcatcgacgagaagatccaggagaaggacctggagaagctgctctgctacaagaagaaccccaagctctacaacaagctgaagatgatcttcaaccgctactacaagagcggggacaacaccaaccccttcatccggtacatggaggaggagtgcaagatcgagaagccgaagtggatccaggtggggaacctccggatcaacaagctccggctgatcggcgagaccaagaactcgaactcggtgatcatcttgaacaagcacaacaagaaggccatctacaagagcttgaagttcctcttcctgcggatctacaaggacaacaacgacaagtaccggctgatcgggatcaaccagaaggtcctgacctacgacaagaagaagtcgcagctgaagatcgacaagaacaagctggacaaggtgctcgagctgaacaacatcttcaactcggagaagtacatcgacatcaagcgggggatgatcttcgtccgcaaggaggacaacaagctcttctggtccatcgggggcgggaccctgagccagaacaagctggagctgaagtccatcaacacgagcaacgagatctcgaacctgggcaagcagttccagcggagcttgtccaccatcgtggcggagtacgacatcgcccaggtggacgagctcggcaacatctacaaccggcggaagatcgagttgaaacgacccgccgccacaaaaaaggccgggcaggcaaagaaaaaaaaggattacaaagacgatgacgacaagtaa

SEQ ID NO: 244 - DNA, 3894 bp, synthetic construct
  source 1..3894: mol_type = other DNA
atggccccaaagaagaagcggaaggtcgacatcgggacgaagtcgctcgggtggtccatcatcgggaagaacaaggagaacaacgagtgggacatcatcgacttcggcgtccggatctgggacgccccggaggtgtccaagaccctggacacctccgcgaaggtccggcgggaggcccgctcctccaagcggatgttccgccggcgccgcgcccggatcaaggacctgaaggactacctggtgaacgagctgaacctgatctcctacaaggagatcaacgaccacttcgacaagctcaaggagaagaacgactactccgtgaccaacaagaagtaccggaacgacatcaacccgctgttcctccggtaccgggccatcaagaacgaggagaagctgacgtccctgcagctgatcatcgtcctcctgtccttcgccaagcggcgggggtacgagaacaagttctcgttcgaggaggacaagggcgggtacgggtcctcctcgaagaagttcatcgggaagaccgaggaggggaacaagaagtaccagttccccatcctcgccatcatggaggacgacttcttcaagtcgaacaacatcgggaaggagcaggagtacttctaccggaaccggaagaacaacaagatcaacaagtccgacaagaacaaggaggtggagcgggagcagatcctcttcctgacgaaggacaacaaggaggagctccggaagatcctcgcgatccagcagaagttctacctcgagctcaccaacgagcgggtggacttcatcctggacgagatcatcttccggaagcgcgacttcgaggacggcccggggccgaagcaggagaacctgaaggagagctggaagaacagcctcaacaagatcaactactacaagcccttcatcgagaacgtgggcaagtgccggttcgtggagggcgagtaccgcacgaacccgttctcgatcctgggcgacctgttcctgatccagaactacctggggcaggtcttcccgaagaacgtcctcaaggtgaagaagatcgacaacatcaccttgaagaagatcgccaaggagatcatcaacgagtacctgaacaacttcgtgctcgacgagaagatcttcaccaagatcctcaagaacaacaacctcatctactcggagttcgacaacttcaagaagatggagaagaacaacccgctggagcagctgttcctggcgtccctggcgaagatcaagcagcccttcgccttcaaggagacgctcaaggagtacctctccagcatcaacctgaacgagctgtcgttcgacgccttcgagaacaacccgatcaacaagctcgggaaggtcctgtacgagaacaagaccccctcccggatcgtgaacaagatcaaggagctggagatcaagaacctgaaccccgacgaggtggagatctggatcaagaagttcaacgaccagttgaagaaggtcaagaaccggaccttctcggtgtccagcaagcacatcttcaacgccctggagaagctcctccaggaggggatcatcatctccgagtaccaggcggagctggagaagaagcagaagcaggaggcgatcaacaagatcgagaacaacaactccaacaacttcctgtcgctgcccaaggaccaggacatgaagaagaacgccgtcgtgttccggtccatcaaccagacccgccgggtgctcaagcagatcttcaagacctacgggcccatcgagaccgtggtcttggagactgccggggacctctacaacgagatctccgtgcggaagcgcatctccaaccagcaggagagcctggtgaaggagaaggaggagcgctcccggcgcctgaaggcgctgggggtgaacgtcaccggggcgaacgacctgaagctgcggctgttcgacagccagaaggatctcaaggagatctccaagaagaacgtgcggtcgatcgacccgtactcgctgtacaaggacaacatcgagtacatcaacgagcgggacatcttcacctcgaagtacgaggtggaccacatcatcccgtactccaagtcgaacgacgactcgctcgccaacaaggtgctggtgagccgcacgaacaaccagctgaaggggaaccggaccccctaccagtggatcaccaacagcttcggggagaaggcgttcgacaacttcaagaagaacatcaagacgtactacttcaaggggaacaagaacctcgggaagttcgcgcgccggaacgagaacctgctgaagaagaacttcagcagggagtcgtacctggagaacgagaccgcgaagatcaacgacacgcggtacatcacgagctacatcgccaactacctggagctcgagatggagaagtacaagcggatcaacggcctgaactacacgccggagatcatcacgctcaacgggaacgtgacgagctacatgcggcgcgtgtggctgtcgaacgacaactggggcaacttcctcaagccccggaacatcacgccgttccaccacgccatcgacgccatcatcctggcgaacctgttcgacaagtaccaggccttctactcgaacctgatcctccggatcgagaagttctactgggaccagttcaacttcgtgaagaagcacgacatcgacttcgagacgacgaagtcgttcttcgagaactaccagaacatcatcgagtaccagatcaagttcgccacccggtacttcaagaccgaggaggtcgaggaggagacgatcaaggcggcgaagatcgccaagcagaacaagatgatcgaggaggtcaagctcctcttcgagtacctcctcatcaacatccaggagaagaacgtgctggacttcaagaccgacccgaacatcaactacctgttcgccccgatcgtgtccaacctcgacgagaaggtcgagaacctgatccccatcaagatcagcatcaaggaggaggtgatcaaggaggacatcaagcagaccaacatcgaggcgaacatgatggacatcccgcaggacgaggtggacaacaagcgcctgtccaacacggacaagaacgagctgcggcggaagaacatcatcctcgaggagatcgtctccccgcaggactgggcgcagaagaacaaccgggagatcaaggatttcccgtacatctcctacaaggagaactacaagcgctcggggaacttcgccaaggcgaaccccatcaagaaggaggtggtcctggggaagatgatcgacttcctcatccaggaggagaaggcgcaccagaaggaggtgaagaccatcgggatggtcgacgccaagcgcgagatcgccaactccaaggcccggatcgtcgacctgcaggagcagctgaagacgaagaactacctgtccctgacgaaggagaacatcgaccggcaggggatctacgtcttcagcggcgagaactactacgagacgtcggagtacctgggcctgcgcttcaacgaggagacgcacaagttcgagaagtacaacctgttcaacgccatcaagaacgggaagaacaagcagaacaagaacgagctgctgatcgtgcggaacacgaccttcaagttgaaggacgaggactggttctacaactacaagggcttctcgggcgtggggttcgccaagagccccaacctgctgtactacagcagcgtcccgacgctccggatcaccttcaaggagagcgacaaggtgtcggagcacagcccgatcatctactcgatctcctccctgatcaacaagatcgaggggatcgtggagatcaacaccctgggcaagtaccaggggatccggaagctcacgaacctgaaacgacccgccgccacaaaaaaggccgggcaggcaaagaaaaaaaaggattacaaagacgatgacgacaagtaa

SEQ ID NO: 245 - RNA, 4110 nt, synthetic construct
  source 1..4110: mol_type = other RNA
atggccccaaagaagaagcggaaggtcaaggactacttcatgggcctggacatggggacgggctcgctggggtgggccgtcaccgactccagctactgcctgtgccgggcccacgggaaggacctgtggggcatcaagctgttcgagtccgccaacacggcggaggagcggcgggtgttccggtgcgggcggcggcggctggaccgccggaaccggcggatccagctgctgcagcagatcttcgccgaggagatggcgaaggtcgaccccgggttcttcctccggctcaaggagagccggtacgtcccggaggacaagcgggacctcaacgggcagacgcccgagctcccgtacgccctgttcgtggaccagagctacacggacaaggacttccaccgggactaccccacgatctaccacctccggaaggagctgatggagtcgtgcgaggccaaggacatccggctggtgtacctggccttgcaccacatcatcaagcaccgcgggcacttcctgttctccggcatcgaggcggacaagatcaccgacttctacgggaccttcacgaagttcatccaggtcctgaaggagcaggagctcgagttcaacctcgagccggaccgggaccagtgcgtgcaggccaaggagatcctggagaacccgcagctgacgaagacggccaaggccagcgggctcatccagaagctccaggccaagacggactgcgagaaggccgtcatgcggctgctcgcgggctgcaaggtgaagctgtccgggatcttcgaggacaaggcctacgacgagaccgagaagccgcagatcagcttctcggaggccgggtacgacgagtacgaggagatcctggagggcgtcctgaacgaccagttcatcgtgatcgccgcggccaaggcgatctacgactggtcgatgctcgtccacatcctgggcgacgcccggaccatctccgaggcgaaggtcaaggtgtacgagaagcaccggcgggacctgaagatcctcaaggacatggtccggaaccacctgtcccgcgaggactacaaggagatcttcgcggtgacggacgagaagaagaacaactactgcgcctacatcgggatgaccaagagcaacaacaagaaggtcccgctggcggggaaggagtgcagccgcgaggagttctacgccttcctcaagaaggaggtggtggatcggatcgaggacaagtcggtcacggagatgctctcccaggagatcgagctggggaccttcctccccaagcaggtctgcaaggagaacggggtgatcccgtaccagctccaggaggtggagctgctcaagatcgtgaagaacgcgggggagtacctcccgttcctcaaggagaacggggacaagatccagaacatcctgacgttccggatcccgtactatgtcgggcccctgaacgtggtgaaggaggccgaccactccttcgcctgggccaagcggaagtccggggagcccgtgtacccctggaacttcgaggaggtcatcgacgtcgaggcctccgcggagatcttcatccggcgcatgaccaacaagtgcacgtacctgccctcggaggacgtgctcccgcgggagtccctcctgtacagcaagttcatggtcctgaacgagctgaacaacctgcgggtcaacggggagaagatctccgtggagctgaagcaggacctctacgagaacctgttcaagcggtaccggaaggtgaccgtgaagaagctcaagaactacctgatccaggagggcatcgtggagaagggggtcgacctctccgggatcgacggggacttcaaggcctccctgaagtcctaccacgacctcaaggagaagctcaccgggctcccgctgagcgagacggagcaggagcagctcatcctgaacgtcacgctcttcggggacgacaaggccctcctgaagcggcgcatcaagaagatgttcagctcgctcacggagggccaggtcaaggggatctgcgccctgtcctacaagggctgggggcggctctcccggaagttcctggaggaggtgatctccccggtccccgagaccggggagatcaagaacatcatcggggccctgtgggagaccaacgacaacctgatgcgcctcctctcgaaccggtacgggttcctcgacgccatcgacgagctcaactcggacgggcagaagtccgagctgacgtacaagaccgtcgagcagctctacgtgtccccggccgtcaagcggcagatctggcagaccctgaaggtcgtcaaggagatcaagaaggagatgggcggcgacccgcggcgggtcttcctcgaggtggcccgggagaagcaggactcgggccgcacgatgagccggaagaagaccctccaggagctctaccggaagtgccaggaggaggagcacgactggctcggggagatcggcaactgggacgagcacacgctcaagtccgaccggctctacctgtactacacccagaaggggcggtgcatgtactgcgggaagcggatcgacatccagaacctgtgggacaagaacacctacgacatcgaccacatcttcccgcagagcaaggtcatggacgactcgctgcggaaccgcgtgctcacctgccggacctgcaacgcgaacaagacggaccactacccgctgcacggggacatccggcagaacatgaagcccttctggtccaacctgaagaacacggggctcatcgacgaggagaagtacaagcggctcatccgggccgacgagttctccccgtcggagctggccgggttcatcgagcggcagctcgtcgagacccggcagtccaccaaggccgtggccgacatcctcaagaaggccatgccggacacggagatcgtgtacgtgaaggccaagacggtctccgcgttccggcagcagttcgagctcatcaaggtccgggagctgaacgactaccaccacgggaaggacgcctacctgaacatcgtggtggggaacacgtacttcgtgaagttcacgaagaacgcgtcctggttcatcgagcagaacccgggccggtcctacaacctcaagcggatgttcgagttcgacgtggagtccaagggggagaccgcgtggaaggcgggctccaaggggacgatcaacatcgtccgcaagatgatggagaagaactcgctgctgttcacccggcggtccttcgaggtccagggcgggctgttcgaccagcagctcatgaagaagggcaagggccaggtgcccatcaagagcagcgacaagcggctgctctccatcgagaagtacgggggctacaacaaggccaccggggcgtacttcgtggtggtcgagtccgaggggaagaagggcatgatgaagcgcacgatcgagtgcgtgcccctctaccgcaagaaggagctcgacaactccgaggagaagctcctcgagtacctcgaggaggagatgcagctgaagaacccgcgcatcctcctcaagaagatcaagacggacaccctgttcaacatcgacgggttccggatgcacctgtccggccggacgggcaagcagctcctcttcaagggggccaaccagctgctcgtcaacagcgagcaggagaaggtcctcaagaaggtggtgaagatcacggagcagatcaagcagaacaagtcctacaagatcaacacgtacgacggcgtgaccgacgagaacctcaacgacctgtaccagctcttcatgaagaagatcgagaacccgccgtacaacgtgcggctctcgagccagaacccggtcctggcgaagggcaaggacaagttcgagcacgccacgcaggagaacaagtgccagatcctgtacgagatcctgcacttgttccagtgcaactcgggcgccgccgacctcaccgggatcggcggcgccaagaaggcgggcatcctggtcctggccaaggacatcaccaagtgcgggcagatctccatcatctaccagtcccccgcggggatccgggagcgggagatcgacctcaagcgcttgaaacgacccgccgccacaaaaaaggccgggcaggcaaagaaaaaaaaggattacaaagacgatgacgacaagtaa

SEQ ID NO: 246 - DNA, 4113 bp, synthetic construct
  source 1..4113: mol_type = other DNA
atggccccaaagaagaagcggaaggtccgggactacttcgtggggctggacatggggaccggctccacggggtgggccgtgacgaacgaggagtacgagatcctgcgggcgcacggcaaggccctgtggggcgtccgcctgttcgagtccgcgaacaccgccgaggagcggcgggtgttccggaccgcgcggcggcgcctcgcgcggcggaactggcggatcgagatcctccaggagatcttcgcggaggagatccacaaggccgacgacggcttctacctccgcatgaaggagtcccgctacgtccccgaggacaagcgggactccctcgggaagtgcccgagcctcccgtacgcgctgttcgtggacagcgactacacggacaaggactaccacgggcagttcccgacgatctaccacctccggaagtacctgatggagacccgggagaccccggacatccggctggtctacctggccctccatcacatgatgaagcaccgggggcacttcctgttctcgggcaacatcgagtcgatcaagaagttcgagtcgacgttcggccagttcctggaccgcctggaggaggaggagctcgagttccacctcatcgccgaggcccgggagaacttcgggggcatcgaggccatcctgaaggactccgcgctcacccggagcgcgaagaagacccgcctcgtgaagctcctcggggcggggacctcctgcgagaaggcggtcctgtccctgatcgtgggcgggaccgccaagctcagcgacatcttcggcgacgacgagctgaaccagtgcgagcggccgaagatctgcttcgcggactccgcgtacgaggactacgcggactccgtggccggggagctcggcgagcggttcctcgtgatcgagcaggccaagacgatctacgactgggccgtgctcgccgacatcctcggcgagtacgactcgctgagcgaggcgaaggtcgccgtctacgagaagcacaagaaggacctggactgcctcaagaccttcgtgcgggagaacctcggccccgacgtgtaccggcgggtcttcgtcatctccgacgagaagctggacaactacggcgcctacatcgggatgacgaagaacaacgggaagaagtgcgacctcgcgggcaagaagtgcgaccgcgacgccttctacgcgttcctccgcaaggaggtgctcaacaacgcccccgacggggagaccgccgagtacatcaagcaggagctcgacaaggggaccttcctcccgaagcaggtgaccaaggagaacggggtcctcccgtaccaggtgcacctgttcgagctgaagcagatcatcaacaacctgaaggaccgcatcctgctcctgcgggagaacgaggagaagatcctcaagaccttcacgttccgcatcccgtactacgtcgggcccctcaacggggtccggcggggcggggacaccaccaactgggtcaagcggcggaccgacgacaagatctacccgtggaacttcagcgaggtggtgaacgaggaggagtccgccgagcggttcatccgccggatgacgaacaagtgcacctacctcatccacgaggacgtgctcccgcggtacagcatgctgtactccaagtacaccgtgctgaacgagctgaacaacctgcggctcaacggggagccgatcgacgtgcggctcaagcagaacatctacaacgacgtgttcatgcggtaccgcaaggtcacgcagaagaagctgcgcgactacctggtgcgggagggcatcgccgacaagaacgtcgacatcaccggcatcgacggggacttcaaggggaccctcaccgcgtaccacgacttcaaggagaagttgacgggggtcgacctctcccaggaggagaaggagaacatcatcctgaacatcaccctgttcggggatgacaagaagctccttctccgccggctgaaggcgatgtaccccaagctctccgacggccagcagaaggccctctgcgggctgtcctacaacgggtggggccgcctgtcggaggccttcctggagcgggtcaccgcgcccgcgccccagaccggggaggtctggaacatcatgcgggcgctctgggagaccaacgacaacctgatgcaggtgctgtcggagaagtaccggttcgccgaggcgatcgaggaggagaacggggccgacgagctccaggagatctcctaccagaccctggagcagctcggcctctcgcccgccgtgcgccggcagatctggcagacgctcaagatcgtccgcgagatctgcaaggtgcagggcgggccgccgaagcgcatcttcgtggagatggcccgggagaagtccgagtccaagcggacggagtcccggaagtcccgcctcatggacctctacaagtcctgcaaggaggaggagcgcgagtggctcgaggagctgagccacatcgacgagcactccctccgcagcgacaagctgtacctgtactacacccagaagggccggtgcatgtacagcggcgagcccatcgccctgtccgagctgtgggacaaccggaagtacgacatcgaccacatctacccgcagtccaaggtcatggacgacagcctggacaaccgggtgctcgtcaagaagacctacaacgcgaacaagacggaccggtaccccatcgacgcggacatccgcaacaagatgaagccggtctggaagtcgctgctggacgggaagttcatctcgaaggagaagtacaaccggctcacccgggggaccgggttcgagccgagcgagctcgccgggttcatcgagcggcagctcgtcgagacccggcaggggaccaaggcggccgccagcatcctgaagcaggccttcccggacaccgaggtggtgtacgtgaaggccaaggtggtctcgcagttccggcaggagttcggcctgatcaaggtccgcgagatgaacgactaccaccacgcgaaggacgcctacctgaacatcgtggtgggcaacgtgtactacaccaagttcacgaagaacgcggcgtggtacgtccggcagaaccccggccggagctacaacctgaagcggatgttcacgtccgaggacgtggtccgcaacggggaggtggcctggaaggccggggagtcgggcaccgtgggggtggtcaagcggacgatggggaagaaccacatcctggtgacccgccgggcctaccaggtcaagggcgggctgttcgaccagcagctcatgaagaagggcaagggccaggtcccggtcaagagcagcgacgagcggctgctctcgatcgagaagtacggcggctacaacaaggccgccgggacctacttcatgctggtcgagtcggaggacaagaaggggaacgcgatccggacgatcgagtacgttcccctctacctccacaagcagatcgaggccggggaggaccaggccctccgctacctgaccaaggagcgggccctgaagaacccgcagatcctgatcccgcggatcaagatcgacaccctcttcaaggtggacgggttctacatgtggctctccggccggacgggcaagcagctcctgttcaagggggcgaaccagctcgtcctctccgcccgggacgccaagacgctcaagaagatcgtcaagtacgtccagcggcggaaggagaaccccaagctgaccatcggcaaccaggacgagatccacacggaggacctcctgtgcctctacgacgccttcctggacaagatcaagtacacggtctaccactcccgcctctccgcccaggagaagaccctgacggagaagcgggaggtgttcctggagctgaacaaggaggagcagtgcctggtgctcttcgagatcctgcacatgttccagtgccagtccgggagcgccaacctcaagctgatcggcggcccggggaacgccgggatcctcctgctgaactcgaacatcaccaagtgcaaccagatcagcatcatcaaccagagcccgacggggatctacgagaccgagatcgacctgaagaagctcaaacgacccgccgccacaaaaaaggccgggcaggcaaagaaaaaaaaggattacaaagacgatgacgacaagtaa

SEQ ID NO: 247 - DNA, 4131 bp, synthetic construct
  source 1..4131: mol_type = other DNA
atggccccaaagaagaagcggaaggtcagccggaagtacagcatcgggctcgacatcggggtcgcctcggtggggtgggcctgcatgacctcggacttccggatcccgaagtacaacgagcggtacgccatcggggtccgggagttcgaggcggccgacaccgccgaggagcggcggatccagcgggggacccgccggcggtacaaccggcggatcaagcggatccagctgctgcagcagagcctcgaggccctgctgcagcagcacccgaacttcctcatgaagacggaggcgaccgagaagcacttctggcggaacaacaaccagttcgagaaccggtcgctctccgaggtcctggcggacctcggggagaacacgcggaagtacccgacgatcttccacctccgccaggccctgctgtcggagaacaagcccttcgacagccggctcatctacatcgtgctgcacaacctggtgaagtaccggggccacttcctgaacgagaacatggagtggaacaacagcagcaacaacgagacgaccatcgacctgacgaaggagtacttctccatcctcacgaacctcgggtacgagacggacgacctgctcgactcgaaccacgagacgacgctgcacgacatcatccagatcctgaagtcgaacgactacaccaacaacgacaagcggaactcgatcaagaagctgatcgggaaggagttccacgacccgatcacgctgatcgtgggcctcaagtcggacatgcacaagctgttccccaacagcgagggggcggcgatctaccagtcggagaagctcaagatgagcttcgccgacgaggacatcaccgaggtgtacgagaagctcacggacgaggagaagctcgtcatcgaccaggccaacaaggtctaccagcacatcctgctgaacgacctcctggacggccacaactccgtggccgcggccaaggtgacgagctacaaccagttctccgaggacctgaagcttctcaaggacgtgttcaacaagtacctgggcgagaaggcctaccgggacatgttcatcacgacccggaagaagtggacgcagtaccagcagacgcggaagaacaacctgctctgcacgttcgaccagttcctgaagatccacgccacggaggacaagttctaccgggacctgaagaagaccatcgagaacatcatcaagaaggagcagaacgccgagctccaggcggtgctcgacaagctcaacaacaaccagttcctgcagaagcagaagagctacctgaacgccgccatcccgcaccagaacaacgtctacgaggcggagacgatcctcaagaaccagcagcagttccacccggagatcacggacaacgtgatcgagaaggtccgggagatcatctccttccggatcccgtactacatcgggccgctggtcaagaaggccacggacgacgacttcgggtgggccatccggaaggacgagcagcagcacgtcctcccgtggaccatcgacgaggtcatcgaccggagcaactccgcggagcagttcatcaaccggatgaccagctactgcgcctacctgaccaacgagaaggtgctgcccaagcactccctgacgtacgagctcttcgaggtgctgaacgagctcaacggcatccagatccggcgggagaacgacctgccggacaaggacttccggctctcggaggaggagaagctctggatcatcaacaacgtgttcaagaagtacaagaacgtgacccacacgatcctcctccgggagctccggaactccgaccacaaggagctggtgctggacacggacaccgacaacctgaagcaggtgtacgggacccagaaggagaacaagttcgggtccagcctcagctcctacatcaccctgtcggagatcttcaacaacatcgaggaggtcgacaacgacatgctcgaggagctgatctactggatcacggtcttcgaggacaaggagatcatcaagctgaagatcaaggagaagtacaaggacatcaacgacaagcagatcaaccggctcatcaacctgcccttcgcggggtggggccggctcagcaacaagctcatcaacgagctgccggccgacaagaactccggggagaccatcctggacatcatgaccaaggacgccctggtcttcatggagatcttgtcgatcgagaagtacaacctcaacgagcggatcaccacgctcaacctcaagaacaacgagtcctacacgaagatcaagtacaaggacatcgcggagctccagggctcccccgccctgaagaagggcatctggcaggccatcctcatcatcgaggagctcgtcgagatcttcggcgagccggagcacatcatgatcgagttcgcccgggaggacgggccgaacatccggacgaagtcccgccagaagcacctggcggacctccagaaggcgatcagcaaggacgagaaggagctgaaggccttcctgaaggagcactcgcactacgaggagcagaagtacaagaacgaccggctcttcctgtacatcacgcaggagggcaagtgcctgtacacgggcgagcccctggtgatctcccggctccaggactacgaggtggaccacatcctcccgcggtccttcgtcaaggacgactccatcgacaacctggcgctggtgacctacaccgcgaaccaggacaagggggacaccaagatgccgctggagacgatgaacgaggaggagaagttccagcagaagcagcactggaagaagctcttcgacaacaagctcatcagccagtcgaagtacttcaagctcatgaaggagtccttctccgaccaggacaaggagtccttcttcgcgcggcagctggtggagacccgccagatcacgaagcacgtgaaggacctgctgaacgaccggttcgagcacaccgagatccacccggtgaacgcgaacatcgtgacgaacctccgcaagcacgcggacgtcgtcaagatccgggacctgaacaacaagcaccacgcgatcgacgccgcgctcgcggtgctggtcgtgcagttcatcgtcaagcagtacgggcacaacttcctgaacttcaacttcaagttccaggaggcccggaagaagtggcgggacatgctgaccaagtacaacaagaacttcttcctcttcagcgacatcgacaagtacgacaagttcacccactactccacgggggagatcctctccggccgggagttcatgagcaccctgaactccgagatcccgtggcagaccacgaagaagatcgggagctcggagtcggcgttctacaagcagacgctgcactccccgcaggtgaagaccgcgaagtactcgtcggacaagacggtgcacggggtgtacgacgagatgaagaacgacagcacgtacctcatctcgtacaaggagctcaacaagaaggggaaggagatcatcaagaacgacttcgtcgacttgtacgtgatcgagaagtatcagctcaaggagaagggccagaaggacctggcccttttcctggccagcaagacggccaagggggaggtcgtggacgccacgatccacaccaagatcgagaagttccagatggtgtcctacgaggggcacgagttctactacatctcgagcggggagatgcacaacgccaagcagctcctgctcccgaacaaggtgatcgacaccatcaacaaggtgcggtcgaaccccaacgagaacaacgaccccacgatgctggcgaacaccttcaagaacatcgccaacgaggtgatcaagcagtactcggagttcctgccggactcccggatcgacctcctcaagaactaccactcggagatcgtcgacgcggagtccttcaaccacggcatcacggagctcttcaagacgaccagcgccagcgcggcgcggtcgcagctgttcggcgcccggtacgtcaagaagccgaagcccgagcagctgctgttcaaccacagctccatcacggggctgcggtaccggaagccgaagtcctacaagcaggacctctggagccagaaacgacccgccgccacaaaaaaggccgggcaggcaaagaaaaaaaaggattacaaagacgatgacgacaagtaa

SEQ ID NO: 248 - DNA, 4146 bp, synthetic construct
  source 1..4146: mol_type = other DNA
atggccccaaagaagaagcggaaggtcaagaacaagatgaaggtctccagcgggggccaggagtactacctgggcctcgacatggggacctcgtcggtcggctgggccgtcaccgacatgaactaccggctgatcaagaagcacggcaagatgctgtggggcatccgcctgttcgagagcgcgaacacggcggaggcccggcgggtcttccgcggggcccgccggcgcatccagcgccagaagaagcggatcgagctgctgcaggagatcttcagcggcgagatcacgaaggaggacccggggttctacctccggatgaaggagtccaagtactacccggaggacaagcgggaccagtccggcgcgaccccggtcctcccgtacgcgctcttcgtggactcccacttcaccgacaaggagtaccacgagcggtaccccacgatctaccacctgcggtacgagctgatgtacgggcagggccggaagttcgacgtccggctggtctacttggccctccaccacatcatcaagcaccgcgggcacttcctgttcgagggcaaggagatgtccgtgatccaggacttcgtgcccgcgttcgacctgttcctcagctacgcgctggagaacgggatcgagatctccgtgggggagaaccagaagcaggagatccagaagatcatggccgaccggaagctcggccggacggccaagaagcaggcgatgggcaaggtcttcgggaccgaccggcagaagaaggccctcgccgccctgctggccgggtcctccgtgaagctcgccgacatcttcggcgacccctcgctcgacgagggggagcagaagaagatctccttcgcggacagctcgttcgacgaccacatcaacgaggtggaggacatcctccaggagcggttcccgctcatcgccacggccaaggccgtgtacgactgggcggtgctgaccgacatcctgaaggactcgtgctgcatctcggaggccaagaagaagatctacgacaagcaccgggaggacctgcggcggctcaaggagctgctgcggaaccagtcggtgctcttccagcaggtcttcggcgtcccgaagaagaaggaggccaactactccgcctacatcgggatggtgaagaagaacgggaagaagatcgagatcgagaagaagtgctccaagcaggagttctacgacttcctcaagaaggtcctcaagcccctcgaggggacggaggacatcttgcaggagatcgagatgggcatcttcatgcccaagcaggtggtccgggagaacggggtgatcccgtaccagctgcaccagtacgagctgaaccagatcctggagcgggccaaggagtacctgccgttcctgtccgagacggacgcggaggggtactccaacatcgacaagatcaagaagctgttccagttcaagatcccctactacgtggggcccgtgaacaccttccacgaggaccagggcggcaactgctgggccgtccggcaggaggccgggcagatctacccctggaacttcgagaagaaggtggatctggagaagtcggccgagaagttcatccaccggatgacgaacaagtgcacctacctggtgggcaaggacgtcctgcccaaggagtccctgctctacgccaagtaccgggtgctcaacgagctgaacaacctgcggatcgacggggagatcgtctccgtcgagctcaagcagcacatctactgcgagctcttcgagaagaagcgccgggtgaccggcaagatgctcaaggagttcctggtccgcgagggggtcatccacaaggagcagatcctctcggggatcgaccagaacttcaagagctcgctcggggcctaccacgacctgaagcagatcctggagggcacccgggtgagcgacctcgacaaggaggacatcatcaaggacatcacgctcttcgcggagagccagaacatgctgaagaagcggctcaagaccaagttcccggagctgaccgagaagcagatccggtgcctggccgagaagaagtactccggctgggcccggctcagccgggagttcctggaggagatggaggcggtcaaccccaagacggggaaggactgcaacatcatcacggccctctgggagaccaacgacaacctgatgaagctcctcgggcacaagtacttctacgccgaggcggtggagaagatcaacgaggagcagatggaccactccgccatctcctaccaggacgtggacgacctctacgtgagcccgtcggtgaagcggcccatctggcaggcggtgcagatcgtgaacgagatcacccggatcatgcacggcgcgccgaagcgcatcttcatcgaggtcgcccgcgagaaggagaagaagccctcggtgaagaacagccggcgcaagcagctgctggacctctaccagagctgcaagaaggaggagtccgggctctacgccgagctctcccaggagaaggacaactccctcaagagcgacaagctcttcctgtactacgcccagctcgggcggtgcatgtactccggggaggcgatcgagctcgagcacctctacaccaaccggtacgacatcgaccacatctacccgcagtccaaggtgatggacgacagcctggacaaccgggtgctcgtcaagcgcgagctcaacgccgagaagtcggactccttccccgtgccggagcagttcctgcagaaggcgggggcgctctggcgggccctgctccagaagggcctgctctccaaggagaagtacgagcgcctgacccggcgcgaggagttctccgacggggagctggcgggcttcatcgcccgccagatcgtggagacgcggcagggcaccaaggccgccgcgcagctcctcaagatcgcgtacccgcagacggagatcgtctacgccaaggcgtcggcggtctcccagttccggcagaagttcgacctgatcaaggtgcgggagctgaacgactaccaccacgcgaaggacgcgtacctgaacatcgtggtggggaacacctaccacgtgaagttcaccaaggacgccgcgtggttcatcgagaacaacccggggcggtcctacaacctgaacaagatgttcacgtcggagcgggtggtccggaacggggagaccgcctggatccccgggaacgacgggagcatctgcgccatcaaggaggcgctctcgaagaacaacatcctgttcacccggcggtccttcgagcagaagggcggcctgttcgaccagcagctggtcaagcgggggaagggccagatccccatcaagggggccggcaccgactcccgcctgatggccaccgacaagtacggggcctacaacaaggcctccggggcctacttcatgctggtcgagtcggagtcgaagaaggggaagcggatccggtcgatcgagtacgtgccggtgtacctcgccaagaagctcgacatggacaagcactcgaagctcgtctactgcgaggagaagctcgggctcaagcaggcccacatcatcatcgacaagatccgcatcgacaccctgctcgacatcgaggggttcaagatgcacgtgtcgggccgcaccggcagccgcctgctcttcaagggcgccaaccagctggtggtgtcccgccgcttccaggaggtggtgaagaaggtctgcaagtactacaacgtgcggaaccagaaccggaacgcggtgctctccgagaaggaggagctgaccgacgaggtcctgctggagctctacgaggagttccagcggaagctcagcaacaccgtctacaaggtgcggctgcactcccagatcgcgacgctggagaaggggaaggaccggttcaccggcctctccaaggaggagaagtgcctcgtcctgtacgagatcctccacctcttccagtgcaacagcatcgcggccaacctgaaggccatcggcggccccgggaagggcggccgcctggtgatgtccaaggacatcagcaagctgaaccacatctacatgatcaaccagtcgatcaccggcttctacgagcaggtgatcgacctgaagtcgatcaaacgacccgccgccacaaaaaaggccgggcaggcaaagaaaaaaaaggattacaaagacgatgacgacaagtaa

SEQ ID NO: 249 - DNA, 4152 bp, synthetic construct
  source 1..4152: mol_type = other DNA
atggccccaaagaagaagcggaaggtcgggcagaaggacttctacctcgggctggacatcgggacggacagcgtggggtacgccgtgacggacgagcagtacaacctgctcaagttctccggcgacgccgcctggggcgtccacctcttcgacgaggcggagctgtcccaggagcggcgggccttccgggtggcccgccgccggctcgaccggcggaagcagcgggtcatgctgctccaggagctcttcgccccggccatccgggccgtggacgccgacttctacaagcggctccaggcctcggacctcttccgggacgaggccggggaccgcttcccgatcttcaacgacgtggactacacggaccgggactactacaaggcgtaccccacgatccaccacctcatctgcgacctcatggcggacgagacggcccacgatgtccggctcgtgtacctggcctgcgcctggctggtgtccaaccgggggcacttcctgtccaacctggacaaggagaacatctcggccctgaagaacttcgacaaggtgtactccgagttcgagcacttcttcaccgacaacgggtacgcctacccgtgggccgaggccgaccggcgcacgatcggcgagatcctcaagaagaagaccacggtgacggccaagaacaaggagctgacgctcgccttcaccgggggcgggatggcccccaaggaggcgagcgaggacttcccgttcggccagcgggccatcatcaagctgctggccggcgggacggcccagctcaaggagctcttcgaccaggaggcctacgccgagttcggcgcggtctccctcaacttcgacgacgacaagttggaggagatcgcgggcaacctgggcgacgacttcgccctcatcaccgccctgcggcaggtcttcgactggtcggtgctggtcgaggccatcggggacgccgccagcatcagcgaggccaaggtggagacctaccgccagcacaaggcggacctggccatcctgaagcggatcatcaagaactaccgccccgagaagtacgacgaggtcttccgggagatcgggaaggccaactacgcggcctacgcgtaccactccaacaagaaggccgacgccaagttcaagaaggtggaccgcgaggccttctcgaagttcatcacgggcatcgtgaaggacatcacgcccaaggcggaggacgaggagatcctcgccgacatgcggaaccgcctcgacctccgcaccttcctgcccaagcagaagaacaccgacaaccgggtgatcccccaccagctctaccagtacgagctgcacgagatcctcaagaacgcggaggggtacctcccgttcttgacggagaaggacgagtccgggctgtcggtgtccgacaagatccggagcatcttcgcgttcaagatcccctacttcgtggggcccctgaacgagaagagcgaccacgcgtggatcgtccgcaaggcggggaagatctacccgtggaacttcgaggacatcgtcgacctggacgcgtccgaggaggggttcatccggcggatgacgaaccagtgcacctacctgccgggcgagcccgtcctcccgaaggacagcctcctgtaccacaagttcaccgtgctgaacgagatcaacaacctctcgatccacggtgagcggatctcggtggagctgaagcagcagatctactcggatctgttcctgaacaagaagaaggtcacccggaagcggctccgggagtacctgatcgtgaacggggtcgtcgagaaggacgacaccgacgcgatcacggggatcgacgaggagatcaagtccaacctgctgccccagatctcgttccggcggctgctggacgagggcacgctgtcggaggaggacgtcgagaagatcatcgagcgctcgacgttctccgacgacaagacgcgcctgaagaagtggctggcgcgggagtacccgcagctcaacagcaaggacgtggactacatccggtccttgcggctgcgggacttcgggcgcctgtcgcaggccttcctggagggcatcatcgcggccgaccggagcaccggggaggccttcaccatcatcagcgcgctctggaacacccagaagaacctgatggagctgctctcggaccagttcaccttcgccgagacgatcgagcgcttccgggaggactactaccgggagcacccggtgagcctctcggagcgcatggacgagatgtacttgtccaactcggtgaagcggagcgtcttccggacgctcgacatcgtgaaggatgtcaagaaggccttcggggccccgaagaagatcttcgtggaggtcacccggggcgggtcgcccgaccagaagggcaagcggaccaagtcccggagccagcagctgcgggagctgtacgacaagtgccgggacgaggacctcccgctgctgaagcagcagctggaggccatgggggacgcggcggacagcaagctgcagtccgagaagctgttcctctactacctccagctggggaagtccgcgtactccgacaagcggatcccgctggaggccctggcctccaaggcctacgacatcgaccacatctacccgcaggccttcgtgaaggacgactccatcatcaacaacaaggtcctcgtcctgagcgaggagaacggggcgaagagcaacaactaccccatccaggggtccatccggcaccacatgcagggcttctggagctacctccaggaggtgggcctgatgtccaaggagaagtacaagcgcctcacccggagcaccccgttcacggaggaggagcggtacggcttcatcaaccgccagctgacgagcacgtcgcagtcgacgaaggcggtggccacgctcctcaaggagcacctgcccgagaccgagatcgtctactgcaaggcgcggctcgtcacggacttccggcaggccttcgacctgttcaagtcgcggcagtacaacgacctgcaccacgcggtcgacgcctacctgaacatcgtgacgggcaacgtgtacaacatgcggttcaccaagaacttcaacgtgcactcgcagtactcgatcaagaccgagacggtcttcacgcggcccgtgacgtacaagtcccagaccatctgggacggcatcgacatgctggccaaggtgaagtccatcgccaacaagaacaccgcccacatcacgaagtacgcgttcatgaagaagggcgggttcttcgaccagctgcccgtccgggcggcggacgggctcatcccccggaagaagcacctgcccacgcagaagtacggcgggtacaacaagccgggggtgatgttcttcatccccgtgaagtaccagctggggaagaagagcgagctgttcatcctccccgtggagctgctctgcgggaagcggttcctggcggacccggagttcgcccaggcctacgccgtgaagcggctcgagcggatcctcaagaagccggtcgaccagatcagcttcccgctcggcatgcggccctggaaggtcaacaccgtcctggccctggacggcttcaagtactgcatcacggggtcgtccaacgggggcacccggctgatcctccagccgatgatgtccttcagctccgcgccctactgggcgttctacctgaagaagctggaggtgttcgtggagaagaacgcgaacaacccccagcacgtctacgacgaggcgtacgacaaggtcaactgcgaggacaacctcaagctgtacgacctgtactgccagaagctgacgagcacgatctacagcaagcggatcaacagcccgctggacatcctgctccaggggcgggagaagttcagcgggctggacatcaagcagcaggcccaggccctgctgaacatccaccaggtgttcggcaggatcgccgggggctgcgacttgacgctcgtcggcggcaagaaggggtcggcggcgaccagcgcctcgtcggcgatctccaacctggggaagcggtaccaggacgtgcgggtctgggacaccagcccgtcggggctctggtccaagcggagccccaacctcctggacctgctcaaacgacccgccgccacaaaaaaggccgggcaggcaaagaaaaaaaaggattacaaagacgatgacgacaagtaa

SEQ ID NO: 250 - DNA, 4161 bp, synthetic construct
  source 1..4161: mol_type = other DNA
atggccccaaagaagaagcggaaggtctactacgggggcatcgacctcgggacgtcctccgtggggtgggcggtcaccgacacggagtaccgcctcatccggaagaaggggaaggacctctggggcgtccgcctcttcgacgaggcgaagagcgcccaggagcggcggtccaaccggaccgcccgccggcggcgggcccgcgagacggcccgcatcgggctcctgaagagctggttcgccgaggagatcgagaaggtggacgccgggttctaccagcggctggaggagtccaagtaccaccgggaggacaagaagaccggctcccggttcgcggtgttcgcggaccgggagttcaccgaccgggagtactacgagaccttccccaccatcttccacctgcggaaggagctcctggagtcgaaggcccacttcgacgtgcgcctcgtgtacctcgcggtgctgaacctcttcaagcaccgcgggcacttcctgaacgagtacctcgagtgggaggagcacgacaagtccatggcggacttgttccaggagttctccgagacgctcccggaggagcccgggctccagttcccgcagatcgcggacggcgtccagatggaggagatcctggggtcgcggctcttctcccggtcggagaaggccgagaagctggccgcgtgcctcgggatctcccgcaaccgcaacaaggcggagtacgagctcgtcaagctcttctgcgggatgagcgggaagccgtccctgatcttcgggcaggaggccctgtccgacgcctggggcaagaagcaggtgagcttccgctccagcgcgtgggaggaggagcgcgaggccctcggggactgcctcccggagggctgcatggacatgatcgaggccgccaagcggatccacgacaagggcctcctggcccacatcctgaaggggcacacgtacctgtcccaggcgcgcgtcgagacgtacgagaagcacaaggaggacctgaagaagctgcggcacgtcatcaagcggtactgccgcgacgagtacgacacgtacttccggacgatgacggaccacaactactcggggtacgtcggcaccgtgaactccggcaaggagaagatccgccggaaccgcggtgccaagaaggaggcctacaaggccttctggaaggagaccaagcggatcctggaccggatgcccccggacgaccaggaggtctcctacctcaagcaggagctcgagaaggagaccctgctgcccaagcagcggaccttcgagaacggggtcatccccaaccagctccacctggcggagctgcggaagatcctctcgaacgccgagacgtacctgtccttcttgcgcaagaaggacgagtcgggcctcacggtgacggagcggatctgcaagctcttcgccttccgcatcccgtactacgtggggccgctctccatcggggagggcggccgcaactggatccagcggaaggagggcgggcgggtcctcccgtggaacatcgaggacaagatcgacatggccaagacccgggaggccttcatcctcaagatggtgcggcagtgcacctacatgaaggggaagcacgtcctcccgaagaacagcctcctctacgaggccttcatggtcctcaacgagctgaacaacgtcaagatccggggcgagaagctcgacgtcgagctgaagcagaagatctaccgggagatgttcctgaccgggaagaaggtcaccgggaagaagctcctccagtacctgtcggccaacggcatcctctcgcccgacgagcaggatgccatcaccggcatcgacgagacgttccaccagagcctcacgtcgtacggccggttctacagcatcctgggggagcagatcgagtcccgggagatccagaacatggccgagcaggtgatcttctggggcacggtctactccggggacaagaagatggccggcgagctcatccgggagacctacggggagcggtcggggaagccctacctgaccgaggcccagatccggcggatctgcggcttcaagtggaaggactgggggcggctctccaaggacttcctggagctccaggggtgctccaagaaggacggggtcaagaagagcctgatccgcgccctgtgggagacggactgcaacctgatggagctcctcggggacgagttcaccttccaggacacgctcgccggccagatccagaagcaggagaagctcctgaaggagttctgctacgacgacctggaggactcctacctgtccgccccggtccgccggatggtctggcagaccatcctgatctggaaggagctctgccaggtcatgggcgaggcccccgcgcggctcttcgtggagatgccgcgcggggagggcgagaaggggaagcggaccgtctcccggaagaagaagctcgaggagctgtacaagacctgcaagaccgacagccgggactggctgaaggagttgcaggacttgtcggaggacgacctccggtcccggaagctgtacctgtactacacccagcgggggaagtgcatgtacaccgggcaccccatctcgctcgaggacctcctcagcgggaaccggtacgacatcgaccacatctacccccggcacttcctcaaggacgactccctcgagaacaacctggtgctggtggagaaggagtcgaacgggcacaagtccgacaccttccccatcgaggccagcgtccggagcaagcgccaggggctgtggaagtccctgaaggacgggggcttcatctcgcccgagaagtacaagcggctcacccgctcgtgggagttcaccgacgaggagctcgccggcttcatcagccggcagatcgtggagaccgggcaggccgcccggtacatcacggggctcctcgaccggctgctccccgagacgaagatcatcttcgtcaaggcggggaacgtctccgccttccggcaccagacggagctgttcaagagccgcgtggtgaacgacttccaccacgcggcggacgcctacctgaacatcgtggtgggcaacgtgtacgacacgaagttcacccagaaccccatccacttcatcaaggcgtaccgccgcgaccagaagtcgaacgcgtaccacatggacaagctgttctggtacgacgtggtgcggaacggggaggtcgcctggaaggccgggcagaccgggacgatccgcaccgtccgggccatgatggcccggaacacgccgctcctgagcaagcgggtgtacgaggcgcacggcgggatcgccaagcagaccatctactccaagaaggaggcgaaggagcgggtgtacatcccggtgaagtcctcggacaagcggctccaggacgtcaccaagtacggcgggttccgcagcgtctcgggcgcctactacttcctcgtggagcacgagaagaaggggaagcgggtgcgcacgctggagcagatgcccgtctacctcaaggcgcggctcgagaccgacgagaaggcctgggagaactactgcatggagaccctgggcctcgtccggccggagatccggtggaagaagatccggatgcggagcctcgtcaagcggaacgggtatctgatgaacctggccggccggaccgagaaccagatctacgtggagaacgccgtctccctgtgcctctcgcggcgctggatcaactacatccggggcctcgagaacttcaaggagctgggcaaggaggaggaccggcgggagaaccgcgagaagcggatcaccaaggagaagaacgagctcctgtaccaggagctcatcgtgaagcaccgcgacacgatctaccagaagaagccgaacccgatgtgcaagaagctcatcgagaagcaggaggccttcgcgggcctcctgcttcgggagcaggtccgggtgctcctggagctgctcaaggtgacccagtgccagaacctgaacatggacgccaaggagatcggcgtcaaggcctcgcccgacaagatcgggaacgaggtcaccgcccaggaggagttcctcctgatcgagcagtcggtcaccggcatctactcctgctccatcgacctcaagacggtcaaacgacccgccgccacaaaaaaggccgggcaggcaaagaaaaaaaaggattacaaagacgatgacgacaagtaa

SEQ ID NO: 251 - DNA, 4164 bp, synthetic construct
  source 1..4164: mol_type = other DNA
atggccccaaagaagaagcggaaggtctactacgggggcatcgacctcgggacgtcgtccgtggggtgggccctcacggacacgaactaccggctcatccggaagaagggcaaggacctgtggggcgtccggctcttcgacgaggcgaagtccgcgcaggagcggcggtccaaccggaccgcccggcgccggcgggcgcgggagaccgcgcgcatcgggctcctgaagtcctacttcgccgacgagatcgacaaggtggacacgggcttctaccagcggctggaggagtccaagtaccacaaggaggacaagaagaccgggaaccggttcgcggtcttcgcggaccgggagttcacggaccgcgagtactacgagacgttccccacggtcttccacctccggaaggagctcctcgagtcggacgccccgttcgacgtccggctggtctacctcgcggtgctgaacctcttcaagcaccgcgggcacttcctgaacgagtacctcgagtgggaggagcacgacaagaacatggccgacctcttccgggagttctacgagaccctcccggaggagtcggagctgcacttcccgcagaccgcggactggacgctcaccgaggagatcctcgggagccgcctgttcacgcggtccgagaaggccgagaagctcgcggcctgcctcgggatcgtccggaaccagaacaaggccgagtacgagatgatcaagctcttctgcgggatgagcggcaagccggccctgatcttcgggcaggagatcgcggccgacgcctacgggaagaagcagctctccttccgctcgagctcgtgcgaggaggagatggaggccctcggggactgcctccccgagggctacatggacatgatcgaggcggccaagcggatccacgacaagggcctgctggcccacatcctcaagggccacacctacctgtcgcaggcccgggtcgagacgtacgagaagcacaaggaggacctcaagaagctccggcacgtcatgaagaagtactgcaaggacgagtacgacgcgtacttccggacgatgacggaccacaactactccgggtacgtggggtccgtcaactccggcaaggagaagatccggcggaaccgcggggccaagaaggaggcctacaaggccttctggaaggagaccaagcggctcctgaacatgatgccccaggaggaccaggaggtcttctacctcaagcaggagctcgagaaggagaccctgctgcccaagcagcggaccttcgagaacggggtgatccccaaccaggtccacctggcggagctcaagaagatcctgagcaacgccgagaagtacctcccgttcctgcgggagaaggacgagaacgggctgaccgtgaccgagcggatctgcaagctgttcgcgttccggatcccgtactacgtcggcccgctctccgtcaagggcggggcgggccggaactggatccagcggaaggagacggggcgggtcctcccgtggaacatggaggagaagatcgacatggccaagacgcgggaggccttcatcctgaagatggtgcggcagtgcacgtacatgaagggcaagtacgtgctgccgaagaactccctccgctacgaggccttcatggtcctcaacgagctgaacaacgtgaagatccgcggggagaagctcgacgtgggcctgaagcagaagatctaccgcgagctcttcctcaccgggaagaaggtcacggggaagaagctcttccagtacctgtgcgtcaacgggatcctgtccccggacgagcaggaggccgtcacggggatagacgagacgttccaccagtccctcacgtcctacggccggttccggtcgatcctcggggacgagatcgagaaccgggagatgcagaagatggccgagcagatcatcttctgggggaccgtgtacagcaacgacaagaagatgtcgggcgagctcatgcgggaggcgtacggggagctgtccgagaagcagtacctcacggagagccagatccggcggatctccggcttcaagtggaaggactgggggcggctctccaaggacttcctggagctccaggggtgctcccggaaggacggcgtgaagcggtccctcatccgggccctctgggagaccgactgcaacctcatggagctcctgggggccgagttcaccttccgggacaccctcacggggcagatccaggagcaggagaagctcctgggggagttctgctaccacgacctggaggactcctacctgtccgccccggtgcgccggatggtctggcagaccatcctcatctggaaggagctctgccagctcatgggcgaggccccggcgcgcctcttcgtggagatgccccggggcgagggggagaagggcaagcgcaccgtctcccggaagaagcggctcgaggagctgtaccaggcctgcaaggccgacagccggaactggctgaaggagatccaggacctgtcggaggacgacctccggtcccggaagctgtacctgtactacacccagcggggccggtgcatgtacaccggccaccccatctccctcgaggacctgctgctgggcaaccggtacgacatcgaccacatctacccgcggcacttcctgaaggacgactcgctggagaacaacctggtcctcgtggagaaggagtccaacggccacaagtcggacaccttccccatcgaggccagcgtccggcgggaccggcaggggctgtggaagtccctgaaggacgggggcttcatctcccaggagaagtacaagcggctcacccgctcgtgggacttcaccgacgaggagctggccggcttcatcagccggcagatcgtcgagaccgggcaggccacgaagtacatcacgggcctgctcgaccggctcctgccggagacggagatcgtcttcgtcaaggccgggaacgtctcggccttccggcaccagacggagctgctgaagtcccggctggtgaacgacttccaccacgcccacgacgcgtacctcaacatcgtcgtgggcaacgtgtactacacgaagttcacgcagaaccccgcgaacttcatccgggcgtaccgccgggaccagaagggcaacgcctaccacatggacaagctcttctggtacgacgtggtgcgcaacggggccgtggcctggaaggccggccaggccgggacgatcggcacggtccgggccatgatggcccggaacacgccgctcctcacgaagcgggtgtacgaggcccacggcgggatcgccgagcagaccatctactcggcgggggaggccaaggagcgggggtacatccccgtcaagagcggggacgagcggctccgggacgtgacgaagtacgggggcttctcgtccgtgagcggcgcgtactacttcctcgtggagcacgagaagaaggggaagcgcgtccgcacgctggagcagatgcccatctacctcaagacgtccctggagaaggacgaggaggcgtggaagaactactgcatcgagaccctcggcctcgtccggccggagatccggtggaagaagatccggatgcggtcgctcgtgaagcggaacgggtacctcatgaacctggccggccgcacgggccggcagatctacgccgagaacgccgtctccctctgcctctcccagaagtgggtcaactacatcaagggcctcgagaacttcaaggagtccgggaaggaggaggaccgccgcgagaacaaggagaagcggatcaccaaggagaagaacgagctgctgtaccaggagctcgtgatcaagcaccgggacacgatctaccggcgcaagccgaacccgatctggaccaagctgatcgagaagcaggcggtgttcgccgagctctcggtccgggagcaggtgaacgtgctcctggagctgctcaaggtgacgcagtgccagaacctctccatggacgccaaggagatcggggtgaaggcctcccccgacaagatcgggaacgaggtcaccgcccaggaggagttcctcctgatcgaccagagcgtcaccggcatctactcctgcacgatcgacctcaagaccatcaaacgacccgccgccacaaaaaaggccgggcaggcaaagaaaaaaaaggattacaaagacgatgacgacaagtaa

SEQ ID NO: 252 - DNA, 4167 bp, synthetic construct
  source 1..4167: mol_type = other DNA
atggccccaaagaagaagcggaaggtcaagcagaagtactacctcgggctggacatggggacgtccagcctggggtgggccgtgaccaacgagaagtactcgctgctccggaagaaggggaaggacctctggggcgtgcggctcttcgaggaggcgaagacggccgccgaccggcggtcctaccggaccgcccggcggcggctgcagcgggagaaggcccgcatcgggtacctccgggagctcttctcggaggagatcaacaagatcgacgcgggcttcttccagcggctggaggactccaagtaccacaaggaggacaagcgggagcaccagcccttcgccctcttcgccgacaagggctacacggaccgcgagtacttcgaggactaccccacgatcttccacctgcggaaggcgctgctggacatcgagaacgaggggaagaccttcgatgtccggctggtctacctggccatcctgaacatgttcaagcaccgggggcacttcctcaacgccaacctggacgacaagtccgggggcgacctcaaggagaagatccacatcctgacgtccatggcgaacaagctgttcgacgacatcagcttcaagaccgtggacatcaaggacatcgagcagatcctggccagcaaggactactcgaactcgacgcggctcgagaagctgctcgagctgttcgagctgtcgaagaccaagaacaaggtcgagacggagatcttcaagatgatctgcggcctgaaggggaccatctcgaagatcttcgcgaacgagagcatggacgaggaggcccagaagctctcgttctcgttccgggacgggaactacgacgagaagatcgtcgagatggaggaggcgctctcggaggagtcctacgagttcatcatgatcatgaagcaggtccacgactgggccgtgctcagcaacatcatgatgggcgaggagtacctctcggtggcgcgggtcaaggcctacgagaagcacaagaaggacctgaacatgctcaaggccctgctcaagaactactccatcaaggagtacaactccatgttccggatcatgaaggacaacaactactcgtcctacatcgggagcgtgatctcccaggagacgatccggcgcaaggggaagtacacgacggacgacttctacaagaacgtgaagtcgatcgtcctcaagtgcgaggagtgcaccgagaaggagtacatcctcagcgagatcgagaagaagacgttcctgcccaagcagaacacgacgtcgaactcggtcatcccgaaccaggtccacaagaaggagctgaagcggatcctcgagaacgcggccaagtacctcgagttcctgaacgacaaggacgacacggggctcaccgtgtcggagaagatcgtgcggctcttcgagttccagatcccgtactacgtggggccgctgagcaacggcgtctgcgacgggaagaacgtctggtccgtccggcgcgagaagggcgccgtgctgccgtggaacttcgaggagaagatcgacgtgaagcagagcagcgagaacttcatcaccaagctggtgaaccactgcacctacctcaacggggagaccgtcctccccaagaactcgctgctctacgagaagttcatggtcctgaacgagctgaacaacctgaagatcaacggggtgaagatcggggtggagctcaagcagagcatctacaacgacgtcttcaagaaggggaagaaggtcacggccaaggccctgatccagtacctgaagaacatcggggagatcgacgccaccgaggagacggtggtgtcggggatcgacggggacttcacgaaccggctcgcgaactacaagaagttcatcgagatcttcaaggtccccacgctcacctacgagcaggagcagatcgccgaggacatcatcttctactccaccgtgtacggggagtcgaagaagttcctcgaggagcggatcagggagaagtacaacgaggagctgtcggagaaccagatcaagcggatcctcggcctcaagttcaaggactggggccggctctcgaaggagctgctgctgctgcaggggatcgacaagcagaccggcgagatctccagcatcatcagcaagatgtggtcggacaactacaacctgatggagctgatcgccaccgacaagttctcgtacgggtacaacatcgagcagaagacctcgaagatcgagaaggtcctgtccgacatcgagtacagcgacctcgacgagatctacatctcggccccggtcaagcggatggtctggcagaccatcctcgtgctgaaggagctcgagaaggtcatgggctgcgagcccgagaagatcttcgtcgagatggcgcgggacgccaacgcgccgaagaagcggacggagtcccgcaagaagaagttcctcgagctctacaagacctgcaagaaggagtcccgggactggaaggaggagctcgaggacaccgaggagagcaagttccggtccaagaagctgtacctgtactacacccagaaggggcggtgcatgtacagcggggaggagatcgagctgaaggatctcttcaacgacaacctgtacgacatcgaccacatctacccgcggcacttcgtgaaggacgacagcatcgagaacaacctcgtgctggtccggaaggtggacaacgcccacaagtcggacgccgtgctggagtcgtcgatccgcaacaagatgtgcggcttctggaagatcctccgggaggggagcttcatcaccgacgagaagtacaagcgcctcatgcggaccgacgacttcagcgacgaggagcgggccggcttcatcagccggcagatcgtggagacgcggcaggggaccaaggtcatcgccgacctcttcacgaagacgttccccgagagcgagatcatctacgtgaaggcggggaacgtctcggacttccggaagaagttcgacttcctgaagtgccgcatcgtgaacgacttccaccacgcgcaggacgcgtacctgaacatcgtggtggggaacgtgtacaacacgaagttcacgcagaacccgatgaacttcatccgggagtacaacaaggaccccaaggccaacaagtaccacatggacaagctcttcgagtacccggtgtcccggaacggccgggacgcctgggtgacgaagaacgcggagtccatctgcatggtcaagaagatgatggagaagaacacgccgctcatcacgcggatgaactacgagagccacggcgggatcgccgaccagacgatctactccgccgaggacgcccagaaggccaagggcaaggggtacatcagcatcaagtcctccgacggcaacctcctcgacacctgcaagtacggcgggatgaagaagtacaccggcacgtacttcctcctgctggagcacaccaagaaggagaagcggatccggaccatcgaggccatgccgctctacctgaaggacaagctcaacacgcgggagaagatcgagaagtacttcgagcagtccgtggacttcgcctacgagcagccgaaggtgatcctggacaagatcaagatgtactccctgatcaaggtggacgggttctacctctacctgacggggcggacggggaaccagctctccgtctgcaacgcggtgcagatgagcctgtccgccgggatggtgaagtacgtccggaagatctcgatcgccaacgagcggtacgccgccgacaaggagttcgagaaggacgagaacatctccgtccagaagaacctcgagctctacgagatcctgaaggagaagcacctcaaccagatctacggcaagcggccgaaccccgtcggcgagaagatcgagaaggggatcgagaagttccggagcctcagcgtccggaagcagatctacgtgctgctgcagatcctgcagctgtcccagctgagcaaccagggggccgacctcctggagatcggcggggagaagaagaccgggacgtcgaagctcaacaagaacatcacggagaagcaggagttcaagctcatcaaccagtccgtgacggggctctacgagaacgagatcgacctgctccggatcaaacgacccgccgccacaaaaaaggccgggcaggcaaagaaaaaaaaggattacaaagacgatgacgacaagtaa

SEQ ID NO: 253 - DNA, 4176 bp, synthetic construct
  source 1..4176: mol_type = other DNA
atggccccaaagaagaagcggaaggtcaacctgcggaacgtcgggtcctacgacgtggggctcgacctcggcacggggtccgtggggtgggccgtcgtcgactccgacggcggcatctgccacttcaagggcaagcccacctgggggagccggatcttccccagcgccgagaccgccgcgggggcccgggtccaccggggccagcggcggcggtacgaccgccgccgccagcggctcaagtggctccaggagttcttcctggaggacatgaaccggctggacccggacttcttcacgcgcctgaaccaggcgcggctcctgccggaggaccggaaggaggggtgcgccgactaccactggccgctcttcaacgagtccgacttcaacgaggtggactactaccggtccttccccaccatctaccacctgcggaaggcgctggcggagaaggaggggaaggccgacctgcggctcatctacctggcgttccacaacatcgtgaagcaccgggggaacttcctgcaccaggacgtccccgggctgagcgcgcgggacgccagcgcgcaggcgtccacctcgtgcctccacgaggcggtggaggagtggtccagcctcctggacctgggggtgagcttcgactgctcgaacttctcccggatcctggaggaccggcggctcagccggtccgacaagaaggacgccctcatgggcaccttctcgtacgggcgggaccagaagaagttctgccaggcggtggtctcggcggtcctggggtaccaggcggacttcggctgcatcttccaggtggagggcgaggggctgaagttcaaggtctccgaggaggagaaggccgagatgttcgtctcctcgtccctcccggacgagggggcgagcctgttcgacgcgctgtgcagcgtgcacagcagctacgtcctcctcgggatcctgaaggactccggcgggaagaccctgtcgttctgcaaggtccgggactacgagaagtaccaccgggacctcagcctcctgaagtccctggtgcggacgtactccccggagtcctaccgggacttcttcgggggcagcctccggcagggggcctgcccgtcggactacgacccggagaaggcctcggggtacaccaagtacaacctccacaagacctcgtacgaggacttccagaaggagatccgcaagctcctcgaggcgaaggccaagctggacgacgactaccaccggatgatggacgagttcgccgaggggagcttcctccggcggctcaagacgtcggacaacgggagcatcccctaccagctccacctcgaggagatgcacgcgatcatcgagaaccagaaggcgtactaccccttcctgggggagaacgccgaccggatcgagtcgctggtctccttccggatcccgtactacgtggggcccttgacgcagcagaacgccgccgtggaccgccgggggaacccccggttcgcctggtcggtccgcaaggaggggatggagaaggcccccgtgcggccctggaactgggacgaggtcatcgaccgggccgagtccgcggagtggttcatcgcccggatgacgggcacctgcacgtacatccacgacgagccggtcctgccgaagtgcagcctcctgtacgagaagttctgcgtgttcaacgagctgaacggggcccggtggacccaggacggggacagcgaggtccggttcgacgcctcggaccgggaggggatcttcgaggacctcttcaagcgggggtccgtgacctacaagaaggtcgaggactggctcgtccggcggggcgccctgaacccccacgtgagcgggggccagggcgagagcaagttcgagagcaagctctcgagccacctgttcttctgcaacgtgctcgaggtcgacgacctcagcaaggcggacgccgacatggcggaggagatcatcctctggaacacgctgttcgaggaccgggccatcctcaaggagaagatcgaggcgtcgttcggctcgcggctcaacgccgaccagatccggaagatctgcaagaagcggttcaccgggtggggtcggctgagcaagaagctcctctgcgacatccgcgtggagaccaactcggggagcaagtccatcatggacgtgctctccgaggggaacccgaacatctgcggggccacgaaggccatggtcttcatggagatcctgcgggacgacaagctcgggttcgaggaggcgatccggaacgagaaccgggaccgcctcaagacgggcttcctgtccgtcgacgagctgccggggagcccggcgctccggcggacggtcaaccaggccgtccgcatcgtggaggagatcacctccatcacgaagcacgccccggacaacatcttcatcgaggtgacccgggacgaggacccgcggaagaaggggctgcgcaccaagcggcggtacgaccgcatcaaggaggcgctgaccatcttcaagggggagtcctcgggcgtgctgagcgagctgaagcggcgggaccacaaggagctcgacgacgagcgcctggccctgtacttcatgcagaacgggcgctcgttgtactcgggcaactccttggacatccgccgcctcagcgagtaccaggtggaccacatcatcccgcagagctacatcaaggacgacagcttcgacaacaaggccctggtcctcgcggacgagaaccagcggaagctggactcgctgctcctggaccagtccatccaggacaaccgcaaggacgagtggcgggcgctgttcgaggcggggctcatctcggagaagaagtaccggaacctcatgtgcgactccatctccgagggccggctgaaggggttcatcaaccggcagatcgtggagacgagccagatcgtcaagtacgtgcagatgatgttcgaggggctctaccccgagacgtcggtggtgcccgtcaaggcggcgctgagctcgcagctccgggaggagtgcgggttcgtgaagtgccgggagatcaacgactaccaccacgcgcacgacgcgctgatcgcctgccagatcgggcggttcatccagttccgccacagcgggatctacagcaacccgatcgggtacacgaaggtggtgcgcgactacgtgcgccagctcggccggcagatgaagtactcccggaagatgcccgggtcggcctcgttcatcgtgagcagcttcctcacgagcgggttcgaccccgagacgggggagctgttcaaggaccggtgggacgcggacttcgagtgcgaccggatccggaagtacctgaactacaaggactgcttcatctcgcggatgccggagatcacctccggcgagttctgggacgccacgatctacccgcccgacaagaaccccgtgctgccgctcaagaaggggctggaccccaagaagtacgggggcttcagctcccagaagttcgcgtacttcttcgtgtacgagtgcacgaagaaggacaagaaggtcttcgggttcagccccgtcccggtctgcgtggcgcagagcctgggctcgaacagccgggccctcatcgactacgccaagcagctgtgcagcgagtcggggacggagttcgtgcggatcgcccgcaagcagctggcgaagtaccagctggtggagatcaacggcgagcggttctacctcaccgggaagaaggaggtgaggaacgccacgcagatcgcgttcgaccaggcccagacggacctgctcaagcgggccttcgagggcgagatctcgaactcgatctcgctctcggacatctaccggtacacgctggacttcagcgaccggtacagcagccgggtcagcgcgctgctccggctgcgggagtgcgagcaggagttcgccaagctcccggtggagatccaggccaacctgatcaagtccatcctgcagtgcctgacggccaagtcgaaccggatcgacctgtccgccatgggcgggtcgaagagcgcgggctgcatccagcccacgttcgtgaagatcttcaactccgacaaggagtccttcttcgtcatcgaccagtcggtgacggggatgttcgagaagcgggtccgcctcgggttcaaacgacccgccgccacaaaaaaggccgggcaggcaaagaaaaaaaaggattacaaagacgatgacgacaagtaa

SEQ ID NO: 254 - DNA, 4176 bp, synthetic construct
  source 1..4176: mol_type = other DNA
atggccccaaagaagaagcggaaggtcaaggagcgcgagtacttcctcgggctcgacatggggacgggctccgtggggtgggccgtcaccgacacggagtacaacctcatcaagatcaaccggaagcgggcctgggggagcgtgctcttcgagacgtcgaagggcgcgaaggagcgccgggtgaaccggtgcgcccggcgccgcctcaagcggcagaaggagcggctcgacctcctgcgggagctcttcgaggaggagatccagaaggtcgactcgggcttcttcctccggatgaaggagtcccgctacgtctacgacgacaagcgggacgagaacggggtgaagccccagctcccgtactcgctgttcgtggacgagaactacacggacgtggactaccaccgggacttcccgaccatctaccacctccggaaggccctgatggaggaggaccggaagttcgacgtccggctcctctacctggccatcgcgcacatcctgaagaaccgggggcacttcctggccaacatgggcagcgacgaggtgaacctggacctgaaggagtccttcaaggccctgctgggcaagtggaacgacatgatggcggacgacgacatcatgtcggtcacggcggggtcggagcagctcgagcagatcgagaagaccctgaaggacacgcgcatcgtcaagagcagcaagaagcaggagatcatcaacatcatcgggatcgcggacaagcggttcaaggagctcgcgtccctgatcgccgggggcaaggtgtcgctctcgaagctcttcgaccggaaggactacgagagcctggagatcaacaagatctccttcgacgacgcctcgtacgaggagaacgaggagtactacgcggccaacctcgaggacaactacgacatcatcgcgtgcgcgaagaacgtgtacgacgggatgatcctgtccaacatcctcaagggggacgagagcgggttcatctcggccgcgaaggtcaaggactacgacaagcacggcaaggacctgaacctgctcaagcgggtgatcctcgaggagggcatcggcgaggacaagcagcggaagatcctgtacaagcgggtcttcggcgtcacgaagaaccaggacaacaactactcgcgctacgtcggcgtcgtgtcgacgaagggccggaagggcgtcatcgaggacaagaagtgcacgcgggcggacttctacaacttcatcaagaaggagatcctccccgagatcaaggagggggacaacaaggagtacatcatcaacgagatcgaggccgactccttcatgccgaaggcgcgcgtgaaggagaactcggtgatcccgtaccagctccacaagaaggagctgaagaagatcctccggaacgcggagaagtaccacccgttcctcaaggagaccgacgagacggggaagtcggtctccgagaagatcatcatgctcctggagttcaagatcccctactacgtggggcccttgaacgtgtccgggagcaacgcgtgggccgtccggtcctcggggaagatcaccccgtggaacttcgaggagaaggtcaacatcgaggagtccgcgaagaacttcatcgagaagatgacctcgaagtgcacgtacctcaagaacgaggacgtccttccgatgtcctcgctgacgtacgagaagttcatggtgctgaacgagatcaacaagatcaagatcaacagcgagcccatctcggtcgagctcaagcaggacatctaccacgagctcttcgagaagaagctcaaggtgacggtcaagcggctcatcgactacctgaaggccgagaagggctacgctgacctcaagaaggaggacatctcgggcatcgacatcgagatcaagtcctccctcaagtcctaccacgccttcaaggagaagttcacgggggtgaacctctccgagaaggcgaaggaggacatcatcaaggacatgacgctcttcggcgcggagccgaagctcctgaagaagcggctcacgtccaagtaccccgagtacgagaaccagatcaacagcctgatcaagtccttgaagtgcaaggactggggccggctctcgtacaagctcctgaacgggctcgcgatcgacgtgcccgggcaggggatgatcggcaccgtgatgtaccggctctggaacaccaacgagaacttcatgcagatcatcgagagctcggactccccgtacgccaagctcatccgcgaggagaacggggaggcccggaagaagggcatcgactactcgatcgtgaacgacctgtacgtcagcccggccgtcaagcggcagatctggaaggccctccaggtcaccgacgagatcatgcacgcgatgggcaagccgcccaagcgcgtgttcgtcgagatggcgcgcgaggagggcgagaagaagcggtccgtgacgcggaaggaccggctgatcgagctgtacaagtccatcaaggacgagaaggccctctacgacaagctcctcaagaccgacaacgacgcgctccggagcgacaagctctacctgtactacacccagctggggaagtgcgcctacacgggcaagaagatcgagatcgacgagctgatgaacaacaacaagtacgacatcgatcacatctacccgcggtccaagaccgcggacgacagcctggacaaccgggtgctcgtgtacaagcccgtgaacgaggacaagaacgacatctacccgctggggaagttcgacagcgggatctacgaccggatgcgcaacgactggctcatctggaagcagaaggggctcatcagcgaggagaagtacaagcggctcacgcggacgacggagctgacgtccgaggagctgctggggttcgtgaaccggcagctcgtcgagacgcggcagtccaccaaggcgttcgcggaggcgctccggtacgtgatcccggaggagacggagatcgtgtactccaaggccgggaacgtgtcgcggttccggcagcagtacaagatcctgaaggtccgggacatcaacgacctccaccacgcgaaggacgcgtacctgaacatcgtggtggggaacgtgtaccacctccggttcacgaaggacgtccggaagtacttcaacaagaacgggacggaccggacgtacaacctgtacaagatgttcgacaaggacgtcaagtgcgggttggagaccgcgtggaaggaggggaaggacgggacggtcatcaaggtcaaggagaccttgaagtgcgaccgcgtcctggtcacccgccagacctacgaggcgggtggcaagctcttcgacgtgcagcccaagaagaagggcaagggccagatcccgctgaagagcgggaagggcaacgagcgcctgaacaacatcaacctgtacgggggctacgacagcgcgtcgatcacgtacttcatgctgatcgagggccggaagaaggaccggcagttccggtacatcgtgccggtgcccctgtacctcaagaaccggatcgaggcggacgagaagttcgccaaggagttcttcgaggacgagtacaagctcaaggatgtcaagctgatccggaagatcctgatgcagaccctcatggtcctcgagggcttcaagatgcggatcgccgcgaagacggacaaccggatcagcttccacaacgcgaaccagctccagctggagcagaagtactacaagccgatcaaggagatcatcaagttcctccaggagcggaaggagcgcaagggggtcacgatcaacgtgaactccgggatcacccacgaggagctgatcaacatgtacatcatgttcaagaagaagctcagcgactcggtctacaacgagatgctgggcaagtactgcgacgtcatcgagaacgggacggcggagttcaagaagctcacgctcgaggagaagagcgtgcagatctacgagctcctgaagttcttccgctgcacgtccgagctgagcgacctcagcatggtcggcggctccaagaacgccgggaccatccggatctcgatcaacgaggtccccaagcggaagaacctggcgatcatctaccagtcggtgaccgggatctacgagaagatcgagcggatcaacgagaaacgacccgccgccacaaaaaaggccgggcaggcaaagaaaaaaaaggattacaaagacgatgacgacaagtaa

SEQ ID NO: 255 - DNA, 4188 bp, synthetic construct
  source 1..4188: mol_type = other DNA
atggccccaaagaagaagcggaaggtcaagaacgccaagaacaagaactactacctgtccctcgacatcgggacggactcggtggggtacgccgccaccgacgagaactacaacctcctgaagttccacggcgagcccgtgtggggcgcgacggtgttcgacgcggcctcgctgaacacggaccggcggaccttccgcacggcccggcggcggctcgaccgccgccagcagcggatcgacctgctgcagcagctcttcgcgaaggagatcgggaagatcgacccgcggttcttcatccggatggaggagtccaccctctacccggaggacaaggcggacaagtacaccttgttcaacgacaagaacttcacggacaaggagtaccacgacaagtaccacacgatccaccacctgatcgacgagctgatgaagagcaacgagccgcacgacgtgcggctcgtgtacttggcgtgcgcgtggctgatcgcgcaccgggggcacttcctccagaacatctcggtggagaagctctcggacatcaaggacttcgaccggatctacgagaacttcatcgcctacttcgactcgaagggcttcgacaagccctggaacaaggactccatcgacgccacgaagctggcggagaccctgaagaaggactcggggatcacgcagaagtacaaggcgctctgcgagctgatctacaacgggaagcccccgaaggagatcagcgacgagttccccttcagcaaggaggggatcctcaagctcctggcgggcggcacctacgagctggcgaagctcttcgacaacgaggactacgccgagctcaccaacaagtcggtgagcttgtcgatggacgacgacaagctcgccgagatcgccgccgagatcggggacgactacgacctgatcgagaacctccggtcgatctacgactggagcattctcgtgaacatcctggcggcgaagaacacgatcagcgaggcgaagatcaaggtgtacgagcagcaccagaaggacctggtgttcctcaagcacgtggtcaagacgtacatccccgagaagtacgacgagatcttccggaagacggactgcgccaactacgcggcgtacagccggcacacggacgagccccacggggccaagtggggcaagaacaaggtcgacttctcggacttcctgaagaagatcatcgacaagatcacgccctcggagggcgacaaggcccagttcgaggacatgaaggagcggctgcagttccagaagttcctgcccaagcagaaggactcggacaaccgggtcatcccgaaccagctgtacctcttcgagctgaaggagatcctgaagaacgcgtcgacctacctgccgttcctcaacgagaccgacgaggacgggatctccacgaagagcaagatcgagtcgatcttctccttccggatcccgtacttcgtcgggccgctgaacgagcggtccgacaaggcctggctggtccggaaggcggaggggaagatcctcccgtggaacttcgagaagattgtggacctcgaggcgtcggagaacgagttcatcaagaagctcacgaacaagtgcagctacatcccgggggaggacgtcctccccaaggactccctcgcctaccacaagttcgaggtgttgaacgagatcaacaacctcaagatcgacggggagaagatctccgtcgagctgaagcagcggatctacaacgagatcttcatgatgaacaagaaggtcacccggaagaagatcgagcagttcctggtgaaggaggggttcatcgagaaggggcgggaggccgccctgacggggatcgacatcacgatcaagtcggacttggcgccgcagcacgccttcaagaagctgatggacagcaacacgctgaccgagaacgaggtggaggagatcatccagcggtccacctacgccgaggacaagtcccggctgagcaagtggctcgagcgggagttcccgaagatcaacgaggaggaccgcaagtacatctgcaacatcaagatcaaggacttcgggcggctgtcgcgcaagttcttgtgcgagctccaggggatcaacaaggagaccggggagccgtgcaccatcctgggggcgctgtggaacaccaactgcaacctcatggagatcctggcgaacgaccggttcacgttcaccgaggagatcgaggagctgcggaagacgtactacagcgagcacggcgacctgaagctggaggaccggctggacgagatgtacatctcgaacgccgtcaagcggccgatctaccgggcgctcgacatcgtctccgagatcaccaaggcgttcgggaagcccacgaagatcttcatcgagatggcgcggggcggctcgaaggacaagaagcgggagcggacgaagtcccgcaaggaccagatcctggagctgtacgacaagttcaagaacgaggacgtcgtgcacctccggaagcagctggaggagatgggcgtgagcgccgacaacaagctccagggggacaagctgttcctgtacttcatgcagatgggcaagtgcatgtacacgggcaagcccatcgacatcgccaacctgggctcgaagctgtacgacatcgaccacatctacccgcagtcgtacgtgaaggacgacagcatcatcaacaacaaggtgctcgtcctgagcgaggcgaacggcctcaagggggacaagtaccccatcgaggagagcgtgcgcaaccagatgcgcgcgttctggaacctcctcaaggagaaggagttcatctccgaggagaagttcaagcggctcacccggagcacgccgttcaccgaggacgagaagctcgggttcatcaaccggcagctcacggagacgagccagagcaccaaggccgtcgccacgctcctgaaggagaagttcaagaacacggagatcgtgtactgcaaggcggggctcacgtccgagttccgccaggagttcgacctcttcaagtcgcggctcttcaacgacctgcaccacgcggtcgacgcgtacctgaacatcgtcacgggcaacgtgtaccacacgaagttcaccaagaacttcaacgtgaacacgcagtactcgatcaagacgaaggcgctcttcacccacccggtgatctgcaacgggaagatcatctgggacggggacaagatgctggccaaggtcaaggagaccgccagcaagaacaacgcgcacttcaccaagttcgcgttcttcaagaagggcgggctcttcgaccagatgcccgtcccggcggccgaggggctcatcccccggaagaaggacctgccgacggagaagtacggcgggtacgacggggtgagcacctcgtacctgctgctggtgcggttctacaccagcaagaagagcgaggtgatgttctaccccgtcccgctgatgctggcggagaagttcgagaaggaggacggcttcgccgaggagtacatcctcagcacgctccggacccagaagaacaacaagatccagaagatcgagatcttgttgaagggccggaagttcaagatcaacagcgtgctgagcctcgacggcttccgggtggccatcgcggccgccagcctcaaggacggccggatggccttccacccgctgatgcagttcagccactccctgcagacggtcttctacatcaagaagctggagaagctggtggagaagaccaaggagaactcgaagctcatctacgacgccgagcacgacatggtgacggtggaggagaacctgaagctgtacgacatctacctgtcgaagctgcagaccatctacagcaagcggccggggaacgggaacatcgccctcgacctcgccaacaagaaggaggtcttctcggcgctgccgccgatcgagcaggccaaggtgctgctccagatccactcgctcttctgccggaacagcttctccggcatcgacttgtccctgatcgggctgtcgaagaagacggccatcgtgcgcaagtcgctgtccctgtcgagctggaagtcggactacaacgacgtccggatcatcgacagcagcgccagcgggctctgggagaagaagtccgagaacctgctggagctgctgaaggtgaaacgacccgccgccacaaaaaaggccgggcaggcaaagaaaaaaaaggattacaaagacgatgacgacaagtaa

SEQ ID NO: 256 - DNA, 4251 bp, synthetic construct
  source 1..4251: mol_type = other DNA
atggccccaaagaagaagcggaaggtcgcgaagaaggacaacaaggtcctcttcaagttcaacgaggacaagatgaagaacgtcaaggagtactacctcgggctcgacatgggggtcgggtccgtggggtgggccgtgacggacacgaactacaacgtgatcaagaagtcccagaagagcctctggggctcccgcctcttcgaggaggcggagacggccgccggccggcggacctaccggtccagccggcggcggctgaaccggcgcaaccagcgcatcaagctcctccaggagtacttcgccccggcgatcagcaagatcgacccggggttctacatccgcctcaaggactccttcttctacgaggaggacaagaccgagcagcagaagaacacgctgttcaacgactcgtccttcaccgacaaggactaccacctggcctaccccacgatctaccacctccggaaggagctgatcgacaaccccaagtaccacgacccgaggctggtctacctggcgtgcgcccacatcctcaagaaccgggggcacttcctgtacggggcgcagaagttcaacacggaggcgctcctggaggagtccatcaaggacttcaacgagctgtactacgagtacttcgacatcaagctcttcaacgacgagaagatctacgagatcgagtccgccatcctggagaagaacctctccaggagcgggcgggccaagaccctcgagggcctgctgaacgacaaggacaagcgggccaagaagtactgcaacctgctcgtggggaacctcgccaagatcgaggacctcttcccggaggagctcgagatcgaggagtcccagagcaagcccaagttctcggaggggaactacgacgagcccgacacgcaggactacctgctcgagaacttgaacgaggagcagctcgccatcgtggacgaggcctacaagatctactcggccgcgatcctccaggacctcctgtcgaacaagagcgggcacaagttctccaccatctcggaggcccgcatcgacacctacaaccagcacaagaaggacctgaagctgctgaaggaggtcgtgaagggcatcgagaaggagaacccgtccgcgaagggcctgtacaacaagatcttcaaggagaacaccaagaagtacaagaactacgtggcctactcgggccacacgtcctcggacgacaagaaggagaagatcggcgtggaggagaagacctcctacgaggacttctccaagttcctcaagaacaacctctcgaagtacgagaagcaggacgagcgcatcgaggagatcatcgagcagctcgacctgaacaacttcctgccgaagatcacgaccaccgacaacggggtcatcccgtaccagctccacctcgacgagctggagaagatcctcgacaacgccaagaagtacatcgaggagctgaacgagaagaaggccgacgagatcaagcagatcttcaccttccgcatcccgtactacgtcgggcccttcgacacgcgctccgagttctcctggatcaagcgggagagcttcgagtccatccgcccctggaacttcaacgaggtggtggacctggacctgtcctcggagcggttcatcaaggagatgaccaacaagtgcacgtacctcatcggggaggacgtgctcgccaagaacagcatcctgtacagcgagtacatgatccggaaccagctgaacacgctgaactacgtcagccccgtgacgaaggacatcaagcggttcgaccacgagacgatcgagtacctgtacgagaagctgttcgtggagaacacgtccgtccgggtgacgaagaaggccatcgccaacacgctgaagaactacaacagcatcttcgccgacatcacgtcggacagcatcggcgggatggacctcgagatcccgcacaagctgaaggcgctgcaggacttcaaccggatctgcagcggcaagctcaacaacaaggagatcgacaagatcgtcgagaagatcaccgtcttcccggacgactccgagatggtcgcgcgcttcatccggaaggaggagttcagcgacaagctgaccgaggaggagatcaagaagctctcccgcctccggtacacggactgggcgccgctgtcggagaagttcctgacggggatcaagaccgagctgaacaacggccggaagtactcgatcatcgacatcctgcggaagaacccgctgaaccccaacagccccctcaacctgatgcagatcatcaacctgaaggagttcaacttctccgagctcatcgaggagcacaacctcggggagaccaacgacccctacgtggtcgacgaggagctcctcgacagcctccggctgtcggcgcccgtccgccggagcatcaaccagaccctcctggtgtgcgaggacatcttcaagatcatgggcggcacgccgaagaagatcttcgtcgagatgacgcggtccgagggcgagaagggcaagcggaccacgtcgcggaagaagcagatcgagaagctgtacgagtcgatcaagaccgacctgaaggactggtacagcatctggaaggacaagctgaagtcgatcgacgacagcgagtaccaggcgaagagcatctacctctacgccatgcaggccggccgggacatgtactccggccaggtcatcgacgagccccggaacctggaggcgtacgacatcgaccacatctacccgcggtcgaagaccaaggacgactcgtggaacaacctcgtcctggtctccaagaagtcgaacgccatgaagggggacaaggtcctctccgaggagatccagaacaagaacaaggactactggcagatgctcctcgacaaggggttcatgtccgaggagaagtaccgccggctcacgcggaagacggagctggacggggaggagctccgctccttcgtcaaccggcagatcgtcgagaccggccagtcgacgaaggccatcacgacgatcttcaaccggatcctgccggagtccaagctggtgttcgtcaaggccaacctggtcagcgacttccgctacaacgacgggaagaagtcgaaggtcatcagcgacctgaacttcccgaaggtccgcgacctgaactcctaccaccacgccaaggacgcctacctgaacatcgtggtgggcaacgtgtacgacacgaagttcacggaggggttcttcgagtccctccggaacaaggagcaccccaagtacaacttggagcgcatctacgacaagaacatcgccgacaagaacggcgagctggtgtggatcgccggcgagaacggcacggtggccaccgtgaagaagttcatgaaccggaacaacatcttcgtcacgtaccgcaccttcaagcggacggggaagctgtacgacgtcaacctcaacaagaaggggtcgggccagtacccgatcaagacgtcggacaagcggctcatgaacctcgacaagtacggtggctacaacgggaccaaggggtcccactactgcctggccaagatcaagaagggcaagaagatcgagtacaagctgctcaccgtgccgatgatcttcgagaaccggaagagcatcaacggggagaccctgatcgagtactacaagaaccagggcgagaacatcgccgagatcgtcaccgacgacatcaagatcaacaccatcctcgagatcgaggagaacctctaccggatccagtcggaccacgacaagagccggatcatctcgccggagtactgcgtggcccactacgggctgaaggaggagaagatcatcaaggacatcgagcggatcacgctcgggaagaccatccggaacgacatcaacgacaaggtcctcgacgacatctacgacgggatccgcctgaagctcaacagcgagaagctgaagaagtacagcttctacgaggagctgaacaacgacatgctcgacaacaagggcatcttcaacaagctgacgatcaaggagaagtgcgagtgcatcatgaagatcgtgcagatcatcagcgggatcaaccaggagaccgacctccggatgatcaacctgaagaagaccatcgggcggaaggcccggtcgcggaccatcaaggggaacaagctccggatcctccaccagagccccacggggttctactcctcgtgggaggaggtgtccctcgagaaacgacccgccgccacaaaaaaggccgggcaggcaaagaaaaaaaaggattacaaagacgatgacgacaagtaa

SEQ ID NO: 257 - DNA, 4260 bp, synthetic construct
  source 1..4260: mol_type = other DNA
atggccccaaagaagaagcggaaggtcaacctccggaactgctccggggagtacaacatcggcctggacatggggaccgggtcggtggggtgggccgtcgccgacaacgacggccagctgttccacttcaagaagcagccgacctggggcagccggctgttcgagtcggcgaacaccgccgccatggcccggatcccccggtcccagcgccggcggtacatccgccggcgctggcggctggacctcctccagtcgctgttccaggacgaggtggagaaggtcgacccggagttcttcatccggctccggcaggcgcggctgctggaggaggaccgggccgaggggcacagcgactaccgctggcccctcttcaacgacacggacttcacggagcacgagtactacaagctgttcccgaccatctaccacctccggaagtggctgatggagaccgaccagcaggcggacatccgcctgatctacctggcgatccacaacatcgtgaagcaccgggggaacttcctccgggaggaccagaagtccctgtcggcgaagacggcgaagccggacgacgcgctccacgcgttcttcaaggccctgaacgactggtgcgcgtcgcgcggctacgagaccgtgaacgacacggcctcggagatcatccgggtgttcaacgacgaggaggcggccccctccgacaagaagaagcggatcgccgcgctcctctgcatctcgctgggggacgacagcgcggcgaaccgcaagtgcaacgaggcgctggccgccgggatggtcggcctgaaggccgagttcaagaacgtcttcggcgagttccaggccgagaagacggcggtctacctgtcgaacgacgaggacgtcgaggccctccgcgagatgtgcccggatgactccgtggacctgttcaaccgggtctgcagcgtgtacagcgcctacgtgctgcaggagctgctgtcgtacgccccgggggagaccatctccatcaacatggtgaagaagtacgagcagtacggggaggacctcgcgctgctcaagaacctcatccgggagtacgcccgggagagctacgacaacttcttccgggggcccaagtacccgggcacgaacatctacgacgtgtccaaggtgcaggggtacaccaagtacaacctgggcacgtcgaagctgtcctacgacggcttcgagaaggccgtcgtggacctgctggggaagaccagcgcggtcaacgacgagcggtaccagagcatggtggacgcgttcgagaagcagcggttcctgcggcgcctgaagacctcggacaacgggtccatctactaccagctccacttcgaggagctgaaggcgatcctgaagaaccagtcgcggttctacccgttcctgatcgccgacgagaagaagatcgagtcgctcgtgtcgttccggatcccgtactacgtcggcccgctgacgtcgcggaacgccgcgatcgaccagcacgggaacaagcggttcgcctgggccgagcggaagccgaaccaggacaacacgccgatcacgccgtggaactgggactccgtgatcgaccggaacaagtccgcggagaagttcatcaagcggatgaccgggacgtgcacctacctccagggggaggaggtgctcccgaagtgctccctgctgtacgaggagttctgcgtgctgaacgagctgaacgggctccggctcaccatcgacggcgaccgggagtaccggctcgacgcggcgcagcgggaggggatcgtgcacgacctcttccactgcaagcggagcgtctcgtacaagcagatcgaggggtggatcacccgggaggaggggttcgagtacccccacgtcaccgggggccagggggcctccgggctggagtccaagatgggctcctacctcttcttctgcaaggaggtgttcgggatcgacgagctcgacccgaaggactacgcgatggtcgaggagatcatcctgtggaacaccctcttcgaggaccggaagatcctccacgagaagctcgtggagaagtacggccggcaggccgggggccccctgagcgaggagcagatcaagaagatctgcaagaagcggttcacggggtgggggcggctgtccaagaagttcctcaccggcctcaaggtccagaccgaggccgggccgaagagcatcatggacgtcctccgggagggggacccgaactccgactcccggcggggccgcgccatggtcatgatggaggtcctccgggacgagaacctgggcttccagaagatggtggacgacttcaacaagaactacttcgaggccaacgggaagctcgcggagatcaacgagcttcccggcagccccgcgatccgccgctcgctcaaccagaccatccggatcgtggacgagatcgcgaagatcgcggggcacgccccgacgaacatcttcatcgaggtgacccgggaggacgacgagcggaagaagggccggcggaccaaccgccggtacgacgagctcaagaacgccctggagcggttcaagaaggaggacccggaggtctggcacgggatctgcgacaccgcgcccaaggacctcaacgagcgcctcacgctgtacttcatgcagcgtgggaagtgcttgtacagcgggcggccgatcaacatcaaccagctgtccgacacgggcctctacgaggtggaccacatcatcccccgggcctacatcaaggacgacagcctggagaacaaggccctggtctaccgggaggagaaccagcgcaagaccgacgcgctgctgatcgacagcagcatccggcagaagatgtcggactactggcggatgctgcacaacgccaagttgatcggggacaagaagtaccggaacctcctccggtccaccatcgacgagaaggccatgaaggggttcgtggcccggcagctcgtggagaccagccagatggtcaagatcatccagagcatgctgaaggtgcggtacccgaacaccaagatcgtgcccgtgaaggcctccatctcgcacaacctgcgggaggaggccgggttcatcaagtgccgggaggcgaacgacttccaccacgcccacgacgcctacctggcgctccggatgggcctcttcatccagaagaggcacccgggggtgtacgagaaccccatcgggctgacccgggtgatccagaagtacgtccggagccagtccgaggagttcaagcgcacccaccacttccccgggtccgccgggttcatcgtgaactccttcatgagctccggcttcgacaaggagaccggggaggtgttcaaggacgactgggacgccgaggcggaggtcgaggggatccggcgggccctcaactaccggcagtgcttcatcagccggatgccgtacgaggacacgggggtcttctgggacgccacgatctactcgccgcggaaccagaagaagaagccggtcctcagcctgaagaacgggctggacccccagaagtacggcgggtactcgcgcgagcagttcgcgtacttcttcgtgtacgaggcccggaagccgggcaaggacgagcacctgttctgcttcgcgcaggtgcccgtctggctggcgatgcgcatcaaggggaaccaggacgcgctggactcctacgcccagaagctggcgcagtcggaggggttcgagtacatcgggatcgagcgggccaagatcctgaagaagcagctgatcgagatcaacggggaccggctgatcgtgaccggcatcaaggaggtgcggaacggcaaggagctggccttcacctccgacgagctggcgctgatcagccggatcacctcgcagaaggagctcaacgagagcgacaacgagctcctgaacgagatctggaaccggctggtggactgcgggaaccagatcgggtggcacttgatggcccagctcaagctgggcgggtacaacgagaagttctcgaagatcgactccaagtcgaagtcggaggtcatcctcgggctggtgaagatcatcaacgccacgacgaacgtcgtggacctcagcctgatcgggggcaagcagcacgccggctgcatgctcctgaactacagcaacgtgctgttcgactccaacacggacttctacatcgtggaccagtccgtgacggggatgttcgagcggcgcacccggatcgggttcaaacgacccgccgccacaaaaaaggccgggcaggcaaagaaaaaaaaggattacaaagacgatgacgacaagtaa

SEQ ID NO: 258 - DNA, 4281 bp, synthetic construct
  source 1..4281: mol_type = other DNA
atggccccaaagaagaagcggaaggtcaacctccgcaaggcctcggactactccgtgggcctggacctggggaccgggtccgtgggctggtgcgccgtggacaacaacggccacctctacagcttcaagcggaagcccacgtgggggtcgcgggtctacgactccgcggcccccgccgcggacgcccggcagttccgggcgctgcggcggcggtacaaccgccgccggcagcggatcaacctgctgcaggggctgttctcggaggagatgaaccacgtcgacccggacttcttcatccggctcaaccagagccagctcctgaaggaggaccgggacgagacgtgcaaggactacgcctgcccgctgttcaagacggtggcggacgagaaggagtactacaagacgtaccccaccatctaccacctccgggcggccctgatgcacgccaaccagaagatggacctgcggctggtgtacctggcgctgcacaacatcgtgaagtaccgggggaacttcctgtaccaggagtacgcccacctcagcgccaaggacgccggcctgtcggagcagtcgtccaacttcctgacgtccatcgagcacttcgaggacgaccggtgcatcagcttcacgtacaacacggcggagatcatccacttcctcaacaacctgaaggtgacccgggcccagaaccgggaggagtggcagaagctgttcgtctgcgacacctcggacgacatcacgaagacgcaggcgaacgcgatcaccaagtgcatcgcgcaggcgatcttcggctaccaggccgacttctccgccctgttccggacggagaaggagaagagcaagttcaagctctcgcaggaggagaaggtgacggccttcgaggagctctgccccacggagttcctcccgctgttcaacgccctcaaggcgatgtacagcgcctacctcctgacgacgatcatcaaggactcgaacggcgggaccatcagcaacgccaagatcagccagtacgacgcgtaccacaacgacctggcgaagctgaaggagctgatcaagcgggtcctggggaaggacgactacgacaccttcttcaagggggtgtactacaagaacaccaagctgtacaacaagcagaaggcggaggggtacaccgcctacaacctggggaagctgtcgtacgacgacttcgccaaggagctgaagaagctcatcatcaagctggagaagtccggcgtcctctccgccgaggacgacgcctgggtgcggcagatccccacccggctcgacaacgaggagttcctgcggcggctgcggacgtcggacaacgggagcatcccgtaccagctccacctggaggagatggacgccatcatcaagaaccaggggaagtactaccccttcctcctcaaggagaaggacaagatcgagtcgctcatcaccttcaggatcccgtactacgtcgggccgctgacgctgaagaacgcggcccgggacgcgtacgggaagccgcggttcgcctggatccagaagaaggagaacgaggcgcacacgcggatcctcccgtggaactgggaggacgtggtggacaagcacgccacggcggaggccttcatccgccggatgacggggaagtgcacgtacctctacgcggaggacgtgctccccaagtgcagcctcctgtaccaggagttctgcgcctacaacgagctgaacggggcccggtggaccacggacaacgaccagttcaaccggttctccgcggactaccgggagtcgatctacaacgacctgttcgtcatgcggaaggggaaggtcacgtacaagaagatcgagaactggctcgagcagcagggggagctgcacccgcacgtgcggggcggccagggcgagaacggcctggagagcaccctctcgagctaccacttcttcaaggacctcttcgagttcgaggtcctgacggagctgcagcggcaggtgatcgagcagatcatcctgtggaacacgatcttcgaggaccggacgatcctgaacgagaagctgaacagccggtcgttccagatggagttcacggcggcgttcaacaacccgctgaccgcggaccagatccagaagatctgcaagaagcggttcacggggtgggggaagctgagcaagaagctcctcacggggctcttcgtcgacatcgacggggagcgcctgacgatcctcgacctgatgatccacggggacgtcacggacggccggaagggccgggcgctgatcttccaggagatcgtcacgatggagcagttcaaggaggcgatctccaagaccaacgaggaggcgctctccaagtgcatcatcgacatcgacgatctcccctgcagcccggcggacaagcggacggtcaaccaggcgctgcgggtggtggaggagatcgcctccatcgccgcctgcgcgccctcgcggatcttcatcgaggtcacgcgggaggaggacacgaagaacaagggcaagcggacggacaagcggacgtccaagctggagatggggctgaagaagctccgcgacagcgagaacaccaaggccatcctggccgagctctcggtccacaagaacctggacgagaagctcaccctgtacttcgcccagaacgggaagtcgctctacagcggcaccccgctggacatcaacgagctgtcccactaccaggtggaccacatcatcccccagtcctacatcaaggacgacagcatcgacaacaaggcgctggtgctcgccagcgagaaccagcgcaagagcgactccctcctcctggaggactcgatccgccggaagatgagcaacacctggaacgccctgttcaaggcggggctcatgtcggagaagaagctgaacaacctcaagtgcagctccatcaccgaccggcggctcaagtccttcatcaaccgccagctggtggagacctcgcagatctgcaagtacgcgatgcagctcctcaaggagaagtatccgcactgcgagatcatcccggtgaaggccgggatctcgtcgggcatccggcacacgtggaacatcgcgaagtgccgggaggccaacgactaccaccacgcgcacgacgcgtacctcgcgtgcgaggtgggccggttcatccagctgcactacccgaagatctacagcaaccccaccgcctacaacaaggaggtgcgggggctgatccagagcaacatcgtgcactccgcgtcggagggcaacgggcggtaccggctgcccggggactccgggtggctgacctacagcttcgcccacaagaagaccgccgcgtgggactgcgacgcggagcgcgaccggctcctccggtacgtcgactaccccgactgcttcgtcacgcggatggcgtacatcgagacgggggcgttctggaagcagacgatctacagcccccacaacgagaaggcgaaggacctcatcccgctgaagaagcacctcgacaccaacaagtacgggggctacagcagcaagaagtacgcgatcttcttcgtgtacgcgagccagaactcgaagggggtgaaggagtgccacctctcggggctgctgatcgcgaagctcgccgtcgcgacggacaacgcgacggggaagatcgacatgcaccggctcatcaagctggaggagcagctggtggccgcgcggggcaccagcatccagatcctccagccgatcgtcttcaagaaccagatgatcgagttcggcaagcgccgggagatcatcacggggctcaaggagcgccggaacgcgaaggagctcgcgttcaagcagcagcacatgcggctgctgaagaagtggaacgacgacatccaggaggaggggcggaagacgacggaggtcatcgacgaggacgcgcagctgaacgagatgttcgacctcatcctcggcaaggccgaccactgcgcgccggcgctgcacaacaagctgctgaacatcgtcggcgccgacgtcgacgactacgcgcggatcgagcagaagttcgccgcgatctcggacaaggacaccaagaagcgggtcctgttcaagatcatcagcaacgccaacgcgcaggagaaccagatcgacctcacggcgatcgaggggtcgaagcatttcggcgtcatctcggactggccgaagaagttcgacatcatcgagcagtcggtcaccgggatgttcgagaagcgcatccacatcgggatcaaacgacccgccgccacaaaaaaggccgggcaggcaaagaaaaaaaaggattacaaagacgatgacgacaagtaa

SEQ ID NO: 259 - DNA, 4299 bp, synthetic construct
  source 1..4299: mol_type = other DNA
atggccccaaagaagaagcggaaggtcaacctccggaaggcctcggactactccgtgggcctggacctggggaccgggtccgtggggtggtgcgccgtcgacaacgacgggtacctctacagcttcaagcggaagcccacctgggggtcgcggatctacgggtccgcggcccccgccgcggacgcgcggcagttccggtcgctccggcggcggtacgaccgccgccggcagcggctgaacctcctccaggagctgttctcggaggagatgtaccacgtcgacccggacttcttcatccggctcaaccagagccagctcctgaaggaggaccgggacgagacgtgcaaggactacgcgtgtccgctgttcaagacggcgatcgacgagaagcagtactacaagacctaccccacgatctaccacctccgggcggcgctgatgcacgccaaccagaagatggacctccggctggtgtacctcgcgctgcacaacatcgtgaagtaccgggggaacttcctgtaccaggagtacacccacctcagcgcgaaggacgccggcctgagcgagcagagctcgaacttcctgacgtccatcgagcacttcgaggacgacaggtgcatcagcttcacctacgacacggcggagatcatccacttcctgaacaacctgaagcccacccgggcccagaaccgggacgagtggcagcggctgttcgtctgcgacacgtcggacgacatcacgaagacgcaggcgaacgccatcacgaagtgcatcgcccaggcgatcttcggctaccaggccgacttctccgccctgttcgggacggagaaggagaagagcaagttcacgctctcccaggaggagaaggtgacgaccttcgaggagctctgccccacggagttcctcccgctgttcaacgccctcaaggcgatgtacagcgcctacctcctgaccacgatcatccgggggtccaacggcgggacgatctcgaacgcgaagatcgcccagtacaacgcgtaccacgacgacctcgccaagctgaagaagctggtgaagcggatcctcgggaaggacaagtactacacgttcttccagggggtctactacaagaacacgaagctgtacaacaagcagaaggccgaggggtacacggcgtacaacctcggcaagctgtcgtacgacgacttcgccaaggacctcaagaagctgatcgaggagctccggaagaacggggtcctgtccgccgaggacgacgcctgggcgcagcagatcccgacgcggctggacaacgaggagttcctccggcggctccggacgtcggacaacgggagcatcccgtaccagctgcacctggaggagatggacgccatcatcaagaaccaggggaagtactaccccttcctcctgaaggagaaggacaagatcgagtccctcatcaccttcaggatcccctactacgtggggccgctcaccctgaagaacgccgcccgggacgcctacgggaagacccggttcgcctggatccagaagaaggagggcgcggagaagaagcgcatcctcccgtggaactgggaggacgtggtggacaagcacgccacggccgaggccttcatccggaggatgacgggcaagtgcacgtacctctacgccgaggacgtgctgcccaagtgcagcctcctgtaccaggagttctgcgcctacaacgagctgaacgggacgcggtggacgacggacaacgaccagtacaaccggttcagcgcggactaccgcgagggggtctacaacgacctcttcgtgcggtccaaggagaaggtcacctacaagaagatcgagcactggctcgagcagcagggggagctgcacccgcacgtcaagggcgggcagggcgagaacggcctggagtcccggctcagctcgtaccacttcttcaaggacctcctgaagttcgacgtgctgacggtgcagcaggagaaggtcatcgagaagatcatcctctggaacacgatcttcgaggaccgggcgatcctcaaggagaagctcaaggcgcagagcttccaggcggagttcaccgccgccttcaacaacccgctgaccgcggagcagatccagaagatctgcaagaagcggttcaccgggtggggcgagctgagcaagaagctgctcaccgggctctccgtcgacatcgacggggagcggctcaccatcctggacctgctcatccacggggacgtgacggacgggcgggccgggcgggccctgatcttccaggagatcgtgacgatgaagcagttcaaggaggccatcgtgaaggccaacgagaaggccctctcgacctgcgtcatcgggatcaacgacctgccctgctcgcccgccgacaagcggacggtcaaccaggccctccgcgtggtcgacgagatcgcgtcgatcgcgagctgcgccccctcccggatcttcatcgaggtgacccgggaggaggacaccaagaacaagggcaagcggacggacaagcggacgtccaagctggagatggggctcaagaagttccgcgacagcgaggacacgaaggccatcctggccgagctctcggcccacaagaacctggacgagaagctcacgctctacttcgcgcagaacggcaagtcgctgtacagcggcacgccgctggacatcaacgacttgtcgcactaccaggtggaccacatcatcccgcagtcgtacatcaaggacgacagcatcgacaacaaggcgttggtgctggcgtccgagaaccagcggaagagcgactcgctcctgctggacgactccatccggcggaagatgtcgaacacctggaacgccctgttcaaggcggggctgatgagcgagaagaagttcaacaacctcaagtgctcctccatcacggaccggcggctcaagagcttcatcaaccggcagctggtggagaccagccagatctgcaagtacgcgatgcagctcttcaaggccaagtacccgcactgcgaggtgatcccggtgaaggccgggatcagctcggggatccggtacacgtggaacatcgcgaagtgccgggaggcgaacgactaccaccacgcccacgacgcctacctggcgtgcgaggtgggccggttcatccagctgcactaccccaagatctacagcaaccccacggcctacaacaaggaggtccggggcctgatccagagcaacatcgtgcactcggggtccgagggcaacgggcggtaccgcctgcccggggactccgggtggctgacgtactccttcgcccacaagaagacggcggcgtgggactgcgacgccgagcgggaccggctgctgaagtacgtcgactacccggactgccacatcacccggatggcctacatcgagacgggggccttctgggaccagaccctctactccccgcacgcggggaagaaggacctgatcccgctgaagaagcacctcgacacgcacaagtacgggggctactccagcaagcagtacgccctcttcttcgtgtacagcctgcagaagaagaagggcaacaaggagtactgcctgagcgggctcccgatcgcgacgctggcggaggccacgcacaacaccaccgggaagatcgacatggaccggctggtgcagctggaggagcagctgatccagctggagaagcagttgatcaccacccaccacgccccgatccagatcgtgcagccgatcgtgtacaagaaccagctgatcgagttcaaggggcgccgggagatcatcaccggcaagaaggagcggcggaacgcctgcgagctggcgttcaagcagcagcacatgcggctgctcaagatgtggaacggggacctgaaggggaagtaccgggagaagaaggaggacgtcgacgaggactgcctcctgaacgagatgttcgacctgatcctggagaagaccagccactacgccccgatgctgcacaaccggctgctggacatcgtgaacgccaacgcgaacgactacagccggatcgagatcatcttcgcggccatcaaggaccagaacgtgaagaagtcggtcctgttcaacgtgatctcgaacgcgaacgcgtccaagaacatgatcgacctcaccgccatcggcgggagcgccaacttcggcgtgatctcggacaagccgcagcagttcgacatcatcgagcagtccgtgacgggcatgttcgagaagcggatccacatcggggtgaaacgacccgccgccacaaaaaaggccgggcaggcaaagaaaaaaaaggattacaaagacgatgacgacaagtaa

SEQ ID NO: 260 - DNA, 4305 bp, synthetic construct
  source 1..4305: mol_type = other DNA
atggccccaaagaagaagcggaaggtcaagaagatcttcagccagcagggccagaactactacctgggcctggacatcggcacggacagcgtgggctgggccgtgaccgacctcaactacaagctcctgcgggtgaacaacaagaacctgtggggcgtgcggctcttcgacgaggcccagcaggcctcggcgcggcggctgcagcgggagagccgccgccggctggagcgccggcggctgcgggtcaacctgctgcagcagatcttcgcgcccgccatcaacgcgaaggacagcaacttcttcgcgcggctggacgactcgaacctgtacggggaggacaagcgggagaagaccaagttctccctgttctccgacaccaacttcacggacatcgacttccacaagaagtacaagacggtgtaccacctgcgggcggccatgatgtccgaggccaacccggacccccggatggtgtacctggccctgcaccacatcgtgaagtaccgcgggcacttcctcatcgagggggagtccatgaacgcggtggagaacatcgcgatgccgatcgaggagatcaagcggtacctcgcggaccgggacgagtcgaactgcaacgactgcttcgacttgtccaagaccgacagcttccgggagctgttggtccagaaggtggggaagaccaccaaggcgaacagcctggcggagtgcttctcggtggagaagcacaacaagaagttcctcaccgtgctgaagctggtggccggctgcagcgtgtcggtgaaggacctgccggtcgagtgcgacgacgagaagctgaagatctgcttcgacggcgactgggagaaccaggagaccgtcctgcgggaggccctgcaggacgactacgtgctcatcgagaacgcgaagctcctgttcgactactcccagttcaaggccatcctggggaaccacaagtacctctcccaggggatggccgagaagtacaagaagcacgaggacgacctcaaggccctgaagtacgtcctccggaagtacttctccaaggagaagtacgacgacatgttccggaacgcctccgacaacaaccacacgaactacaccgcctacagcgggcgggtgtcgttcggccggaagaacggcaagaaggtggtgttggaggtgaagtcgaactcgcgggagtacgacgacttcatcaagtacgtgaaggaggtcctgtcgtcgtcggagacggcgatgcaggacgaggtgtccaagcggatcctcacggacatcgagaagaaggagttcatgccgaagcaggtgagcaagaacaacgccaccctgccgtaccagctcaacctggcggagctggacgcgatcctcgagaacgcgtccaagtactccgagtacgccttcctcaacgagaaggacgaggacggcatctccgccagggtgaagatccggagcctgctcacgttccggatgccgtactacgtgggccccgtcaacaactcctccgggaagtactggatcgtcaagaaggacgacgggcggatcatgccgtggaactacgagcagaagatcgacctggagcagaccgagcggaacttcatcgagcggatgacgaacgcctgctcgtacttcccggaggagaaggtgctgcccaagtgcagcctcctgtacgaggagtacgtcttcctcaacatcgtgaacaagatcaagatcaacggggagcccatccccgtgtcgctcaagcagcgcctgagcgactactacgccgagaccggcgccaacaagctgtcgaagaagttcctcaagcggtggctgatcgaggagaacgtcgcgcagaacgacgacgacctccagatcgagggcttcgacgacggggccaccgtgcaccggcggacgttctaccagttcgtccagatcttcgggtcgaagcaggccgtcctcgagaacctcaaggacatcgaggagatcgtgaagtacgccacgatctccgggtcggagaagtccaacctggagaagtggctggtcaagaactacaagtacctccagaaggagcagatcaagcggatcaagggcctcacctgcaaggggtggggccggtgctcccagaagttcttgatcaccaagttcggcaccaacccggagaccggggaggtgaactccctgtccgtgatggacgtgctccgggacaccacgctcaacttcatggagctctggaacgacgaggtctacggcttctcgaaggccttcgactcggagaacaacaagtcgtacgagggcatctcgtactcgatcgtgggggagctctactgctcccccgcggtcaagaagcagatctggcaggccctcaccgtggtgaaggagctccggggcatcctcgggtgcgccccctcgaagatcttcgtcgaggtggcgcgcggctccgacagcaagaaggacaagctggaggagcggaagcgcaccacctcgcgctacgagcagctgaagaaggtcttcgaggacatccgccggcagaacgacgcctccctggcggaggacgtctacgacaagttcgtcaaggtcggcgagcggaaggagaagctgcagaaccagaagctctacctgtacttcctccagaacgggctggacgcctacacgggcgagcccatcgactacaaccacctcgagctctacgacaaggaccacatctacccgcggtccaaggtcaaggacgacagcatccacaacaacctggtgctgacgtaccggccgcagaacgcggtcaagcgggacgactacccgatctcggagaagatccggaacaacccgaaggtgaaggccctctggaagaccctgcgggcgcagggcctcatgaccgaggagaagtacaagcggctgacccggacgaccgagctccgggacgacgagatggcggacttcatcaaccgccagctcgtcgagacccggcagtcgaccaaggaggtcatcggcgtcctcaagcgggtcttcgcggactcggagatcgtctggtccaaggccagcaacgtctccgacttccgcgcgctcccgaagcgcatcggggaggtgtcggtgccgcggttcgtgaagtgccgcgagctgaacgatcttcaccacgcgaaggacgcctacctcaacatcgtggtgggcaacaccttcaacgtccggtacgggcacaacgccaagtactgggtgaaggagcaccccaccgagaagctgacgtcctccgcgaagatctacgagtgcgacgtgaagacccagaaggtcaccgcgtggatcgcgggggacaacggcacgatggcccaggtggagaagacgatgcggagcaacgccgtcctcttcacccgggagtcgaaggtggcgaagggggcgctcttcaacgccaccatcgagaagaaggacgagaagggcgagaagaacctcgtcccgctcaagaactgctccagcaactgcgggaagcgggccaagatgagccagacgtccaagtacggcgggtacaacagcgagtcccgcacgtactacatgctggtgaagtacgtggagcgcaaggagcgcaagaaggggaccgtggagaaggtcaagtacaagttcctgggcgtcacggcgaaggacgcccacatgctcacggacgacgccagccgcgtggagtactgcgagaacttcgggctcgcggagccgatcatcctgctggacaagatcaagatccacacgatgttcgagttcgaggggacccggctcaccctcgccgggatgaccgggaaccggctcgtgtggcgcctcgcccagcagaacgtgcaggacgaggagaccgagcggtacctcaagaaggtcatcaacgtcctggagaagcggaagaaggacgcggactacaagatctgcgacaaggacggggtgagcgaggagcagaacctgatcctctacaacagcgtggtggacacgctgttgtccccgaagtacgcggggagcgggtccctggtgagcttcgccaagaagctcagcgccacgaacctcatggacaagttcaaggagctgtccgtcgagaagcagtgcgtggtgctgggcgagatctgcaaggtcctgcagtgcaacgccctcgcgagcgacctctcgctcctgggcgagggcaagacctgcgggaagatcctcacccagtccacgctcgacaacctcgacgagatcagcgtggtgcaccggtccgtgagcgggctcttcgagaagaagatcccgctctacgtgttcgacaagaaacgacccgccgccacaaaaaaggccgggcaggcaaagaaaaaaaaggattacaaagacgatgacgacaagtaa

SEQ ID NO: 261 - DNA, 4359 bp, synthetic construct
  source 1..4359: mol_type = other DNA
atggccccaaagaagaagcggaaggtcaacgagaagcggccctactacatcgggctggactgcggcaccaactcggtggggtgggccgcgaccgacgagaagtaccaccttctcaaggggacgcggcgcatcaagaacgacaagggcctgaagaccaagaagcagacgctctggggcttccggctcttcgacgaggccaacacggccgcggagcgccgcgtccagcggtccacccggcgccgcggggcccgggcgaagaaccgcctgaagctcctgcggatgctgttccgcgacgagatcgcggaggtggacccgggcttctaccagcggctgaaggagtccttctactacgaggaggacaagcggctgcggcggaacagcaagaacacgctgttcaacgaccagaacttcacggaccgggacttccacgcggagtacccgaccatctggcacctccgccagtcgatcatcgaccccaagaacaaggacaagaagttcgacatccgcctgtacttcctcgccatccagcacatcctgaagcaccggggccacttcctcctgcaggggaacatcggggacggcggggccgacttcctcccgctgttcgacgcgttccgcgacgaggcggagcgcctcgggtgccgcatcgcggacgtcccgaacgaggtgggggcgcttctcatgaaggagtcctcgaagacggacaagaagaaggacctgaagaacatcctctacctcgagggcgacgagctcgacgaggacgcccccaaggggcaggccgagctggccgggctcctcgtcggctcgaaggtcaacctcaagaagatcttcgccatcgaggacgaggagaagttcccctactccttcgccgagggcgtcttcgaggacaagatcctggacatcgagcaggccatcggggccgagaacctcgacctggtgtacgccgcgaagaacatctacgactacgtggtgctgcacaacctgctcgggaagcacaagatgatctcggacgcgatggtcgtcaactacgagctccacgaggaggacctcgggaagctgaagaagatcttcaagccccacaaggagctctaccacaagctcttcaagacggagctgtacgacgagaagttcccgtcgtacgacgcctacatcgggaaggcgtacacccaggacaagtccgggcggaagtcctccaagtccatcaaccaggaggacttcaacaagcacctgcacaagctgctgacggagatcaagccgaagaccagcccggacctcctgccgctcgtggacgagctcctcgagcggacggagacgggggagaagtccaccctctccttcctgctcccgaagcagcgggggcaggccaaggggaccatcccgatgcagctccacgccaacgagctgaacatcatcctggagaagctccagcgggactacccgagcttcgccgtggaggtggccggcgagaagtcggagtacaacaccaaggcgaagaagatcctgaagatccacagcttccggatcccgtactactgcgggcccatcgtcaagcggaagtacgacgacaacgggaagctggtccccaaggggaagtcccagttcagctgggccgacgaggagatcagcgagctggtctacccgtggaacttcgacgagctcgtcaacaaggacgggcgggcccagaacttcatccggcggatgaccaacgagtgcacgtacctcctgggggaggacgtgctccccaagaactcgctcatctaccagaagttcatggtgctcaacgagctgaacaacctgaagatcaacaaccagcggatcgacaaccggctgaagcagcagatcttcgagtgcggctacgagaagggcgagctgaagggggacatcaccctgaagaagctcgagcggtggtgcaaggacaacagcctgatcgggaacaacgacgagctgtccgggacctcggaggtgaagaacctcccgaagtaccagacctaccaggacttctgccggatcctcggcgacgacttcgggcagaagtacacccagaccaagctcgagaagatcatcgagctgatcaccatcctgggggacgagaaggacatgctcggccgctcgatccagcgcgagctggactgcgacagcgagctcgcgaagaagctgagcaagctgtcgtacaaggactggggccggatgtcggccaagttcctggacgggatcgtggtgaacaaccacaccatcctggactacctctgggaggacaacaagaacctcatggagctcctcggccaggaggtggggttcgggaaggtggtggagcagtacaacgacaccaagctgcccgcctccgccaagatcaactaccaggacgtggtgaagctgtactgctccccggccgtgaagcggtcggtctggcagacgatcaagatcgtcaacgagctggtgaagaacatcggctgcgcgccggccaagatcttcctggaggtgacccggggcgaggaccccaagtccaaggggaagtacaccctcgcccggaagcgggacctcgagacgaagttcaaggccgtcaagaccgacaacgcgcgggcgatcctcgagcagctcgagggcttcgaggaccgggacctccagtccaagaagctcttcctgtacttctcccagatggggaagtgcgcctactcgggggagcccatcaacctggaggacctgaacaactcgcagctctacgacatcgaccacatctacccgcggtcgaagacgaaggacgacagcatcacccggaacctggtgttggtcaaggcctccctcaaccgggagaagaccaacacctaccccatctccgagtcgatccggggcaagatgaggggcatgtgggccgcctggctccgggcgggcctcatcaccaaggagaagtacgagcggctcgtgcgctccaccccgctcaccgacgacgagctgggcgggttcatcgcccgccagctcgtcgagacctcccagagcgtcaaggccatccgggacctcctgtcccggatctacccggccaccaagatcgtcatggtgaaggccgggcaggtgtcggagttccggcacctgatgggcggggacaagaaggacaagaccggcaacatctgccagaagggcaagtacgagttcatcaaggtccgggacctcaacgacctgcaccacgcgaaggacgcgtacctgaacatcgtggtggggaacgtcatgcacgagacgttcaccgacaacccctacgagtggatcaagaagcgcgaggggaaggagtactccatccgccccgagcgcatcttccgcgagtcccagacctaccagctgtcggacggccggcagacctcgtaccccaaggtgcggggctgggacttcgcggagtccaccaagatcgtgtccgacacgatgaagcggaacgacgtcatctgggcccggatgaactacgtcgagtccaaggagatctcggacctccagctcgtggggaagggcgggaagtccgagaacctcctgcgcatcaagcgccaggaccgcctggaccccaagaagtacgggggctacaactccctcaagggggcccacttcgccctcatcgaggccaagaacaagaagggcgaggtggagcggcggctcatccagatccccatcatcgcccggaacgacgtggagaagtacgtgaacgagaactaccccggggcccaggtgatcatctcggtcatcaagatcaagagcaagctcaagatcgaccacatcccgatctgcatcatgaacaaggactccgagagcaagaacgggtactgccacgccctgcaggccctgttccccgccaaccacaactactacctgaagaagatcagcgcggtggtgaagaaggaccagctcgcgcggtccaactacgagatctcggagcgggacgaggtgaacatcgaggggaacctcgccatctacgacctgttctgccggaagctcaacctgtactccggcctcccggagctggccagcgtgatccccaagatcctgtccagcaaggagaagttcgcgcggctggacctcaagcagcagtgcctgaccctcagccagatgctcaacatcctgagctgcgggccccagaacgcgaagctggggaacatcgggtgcggggacaacgccggccggatccggatcagcaacgacaagctgttcaagttcaccgagctctacctggtgaaccagagcccgacggggctctacgaggagatcatcgacctcaagaccgtgcagcccaagaagtcctggaaggcggccaaacgacccgccgccacaaaaaaggccgggcaggcaaagaaaaaaaaggattacaaagacgatgacgacaagtaa

SEQ ID NO: 262 - DNA, 4377 bp, synthetic construct
  source 1..4377: mol_type = other DNA
atggccccaaagaagaagcggaaggtcaaggagaagcagccctactacatcgggctggactgcgggaccagctcggtggggtgggcggtcacggacgagacgtaccgcctgctcaaggggacgcaccggatcaagtccgacaactccaccaagaccaagcggcagacgctgtggggcttccgcctcttcgacgaggcggagaccgcggtggagcggcggacccaccggtccgcccgccgccgcggggagcgggccaagacccggctcaagcttctccggatgctcttccacgacgagatcgccaaggtggaccccgagttctaccagcggctcaaggagtcgttctactacgaggaggacaagaacctccagaagaagagcaagaacacgctcttcaacgactccaacttcaccgacaaggacttccacaagaagtacccgacgatctggcacctccgccaggcgatcatcaactcggacgacagccagcacttcgacatccggctgtacttcctggcgatccagcacatcctgaagcaccgggggcacttcctgctctcgggctccgtcggggacgggggcatcgacttcgagaacctcttcgagtccttccggaccgaggcggagcgcgtcgggtacgacatcgcggacatcccggaggaggtggagaacatcctggccaagaaggccagcaagaccgacaagaagaaggagctcaaggagatcctctacctggagggggacgacctcggggaggacgtccccaagggccaggccgagctggccgggctcctggtcgggtccaaggtggacctgaagaagatcttctcggcggaggacgacgagaagttcccgtactccttcaacgagggggtcttcgaggagaagctccccgagatcgagcaggcgatcgggccggacaacctggacctgatcttcgcgtcgaagaacatctacgactacatcatcctgcacaacctgctcggggagcacaagatgatctccgacgccatggtgtcgaactacgacctccaccagagcgatctcaagaagctgaagcaggtcttcaagccccacccggagatctacacgcagctcttcaaggacaagaagcacggcacgtacgacaagaagagcaaccggttcgacgcgaacaagaactcgtcgtacggcgtgtacgccgggcgggactaccaggccgagggggaccggaacgggcacatcaccacgagccaggaggacttcaacaagtacctctacaagctcctggaggagatcaagcccaagtccctcccggagctcacgtcgctcatcgacgagctcctggaccgggcggacacgtccgagaagagcatctcgcccctgctgctgcccaagcagcgggggcagaccaaggggacgatccccatgcagctccacgcgaacgagctggggctgatcctggagaagctccagcgggacttcccctcgttcgcggagatcgtgagcggggaggacgagtcctacaacacgaaggcgaagaagatcgccaagatccacgagttccggatcccgtactactgcgggccgctcgtgacgtcccggaagtcccagttctcctgggccgacaaggagatcctggagctgatctacccctggaacttcaactacgtgatggggaagaccgggcagatcgactcccgggcgaacgccttcatccggcgcatgaccaacgagtgcacctacctcgtgggggaggacgtcctccccaagtgcagcctcacgtaccagaagtacatggtgctcaacgagctcaactcgttgaaggtcaacgggcaccggatcgacaacgagctgaagcagaagatcttcgagcgcgggtacaaggggtcggagatcaaggggaacatcaccctgaagaagctcgagaagtggtgcaaggacaactccttgatcgggtcgaacgacggcctgagcggcgccaacgaggtcaaggtgctgccgaagtaccagacctaccaggacttccagcggatcctgggcatcgacttcgagaagaagtacgccctggacaagctggagaaggtggtggaggccatcaccgtcctgggggaggagaagacgatgctcaagaagaacatcgagcgcgagctcggctgcgacgacaagacggccaccctcctctcgaagctctcctacaaggactggggccgcatgtcggccaagttcctggacggcatcaccatcaagaaccggaccatcctcaactacctctgggaggacaacaagaacctcatggagctgctggggcaggaggtcgggttcagccagatcgcggacgagtacaactcgaccaagcggccggcgtcgacgaaggtgtcgtaccgggacgtcgacgggctgtactgcagcccggccgtgaagcggtcggtctggcagacgatcaagatcgtcaacgagctgaccaagaacctggggtacgcccccaagaagatcttcctggaggtcacgcgcggcgaggacgagaagtccaaggggaagtacaccctggcccggaagaaggacctggaggccaagctcaaggccatcaagaccgaggacgccgaggcgatcctcaaggagctgaactccgggaagtacgaggaccgggacctccagagcaagaagctcttcctgtacttctcccagatggggaagtgcgcctactcgggcgagcccatcgacctcgaggagctcaacaactcgcagatctacgacatcgaccacatctacccgcggtcgaagacgaaggacgactccatcacccggaacctcgtgctggtcaaggcctccctgaaccgggagaagaccaacacctacccgatctcggactccatccggtccaagatgcacggggtgtggtcgatctggtaccagaagggcctgatcaccaaggagaagtacgagcggctgatccgggtggccccgctgacggacgacgagctgggcggcttcgtcgcccgccagctcgtcgagacgtcgcagagcatcaaggccatccgggacctcctcaagcgggcgtacccggagaccaagatcatcatggtcaaggccgggcaggtctcggagttccggcacctgatgtcgtccgacaagaaggaccgggacgggaacgtctacgagcggggcaagtacgagttcatcaaggtgcgggacatcaacgacctgcaccacgcgaaggacgcgtacctgaacatcgtggtggggaacgtcatgcaggagacgttcaccgacaacccgtccgagtggatcaagcagcgggacgggaaggagtactccatccgcccggagaagctgttccgggcgagccagaagtaccagaaggccaacggggaggagaccatctaccccgaggtgcgcggctggaacttcgcggactcgatcgagatcgtgtccaacacgatgaagcggaacgacgtcatctggacgcggatgaactacatcgagtccaaggagatctccgacctccagctcgtcgggaagggcgagaactcggacgggctgctccgcatcaagcagcagaagcggctgaacccgaagaagtacgggggctacaacagcctcaagggggcgcacttcgccctcatcgagtgccgggacaagaagggcaacatccagcggcggatcgtgcagatccccatcatcgtcgaggacaacatcgagaagtacgtcatcgagtcctacaacgacgcgaaggtgatcctgccggtcatcaagtacaagtcgctgatcaagatcaacggcttcccgatgcacatcagccgcaagggcggcgaggtggccatcgggttctaccacgccgtgcaggccttcgtgccgtccaaggacatgaagtacctcaagaagctggtgaacttctccagcaagtacaagcagatgcacgacaagaacgaggtgaacatggagaaggagcccatcgacaagggctgcaacgagcagctcttcaagatcttcctgaagaagctcaaggcgtaccggaacatgccggagctcggcgggaagatcaacgagatcgaggactgcaagacggacttcgacaacctcaacctccgggaccagagcctggtcctggtggagttcctgaagatcctgtcctgcggccccgagaccgccaacctgctctccttcgtccccaaggcgggggccgtggggaaggggaagttcaacgacaacatcctgaactacgactcctccttcctcatcaaccagagcccgacggggctctacgaggaggtggtggacctcaagacggtccagtccaaggcccagaagggcaaggagtcgaaacgacccgccgccacaaaaaaggccgggcaggcaaagaaaaaaaaggattacaaagacgatgacgacaagtaa

SEQ ID NO: 263 - DNA, 4416 bp, synthetic construct
  source 1..4416: mol_type = other DNA
atggccccaaagaagaagcggaaggtcaagatcttcgtgtccatcgaccagggcgcgaagaacaccgggctggtgctggccgaggtggacagcaacggccagctccagaacctggaggggaacgtcgtctcgatcaacgagaacgagttcaagaccagccagctggaccggcgcaccaagcgccaccagcggcggcgctacaagcgccgcaagctggccaagcggctgctccggctgatcctggagaaggagttcggctggaacttctccaagaagtgcatcaagcagaaggagttcatcttcgggctcctgaaccggcgcgggttctcctacatcgtggaggacctcgacgtcgagaccctcaacaacgaggacttcatcgacttcatcgtcaagctgttccccgaccagctcaacaaggacgagaagttgacggagcagatcgagaagaactactccaacccggagtggttcaagtcgatcctggacaacccgaactccaagttcgtgtccgggaagaacaagaactccaacgagcagacgctcgaggggtactgcaaggacaagaacctgaagtactccaaggagcttgagcgcttctacaacaagttcatcgggaccatctcgcagttctacgacgagatgtccgggggcgccaagcaccggaagaagtacttcgaggagatcaagaccgtgatctacaactcgaaccccctggacgagatcttccgggggtcgaagatcgacgagaagaagttcttcaagatcgtcgcccacatctcgaacttccccctccgggtgctccggaagtacttcaacgacaagaagatgaaggacgggggctactgggacgacaagcgcctgaagaagatcttcttgcgggaggtgcgctcgtggcacacgagcgggaacaacgagctgaagaagcggcggaagcggctcatcagcttgttgacggaccccaacaaggggatcctcgagttctggttcgagctcgaccccatcgagacgatcccgccctacgaggacatgaacaaccggaacatcccgctgtgccagacgctgtacctcgaccccgagaagctgaacgagaagttcaaggggtggaaggccatcctcaacaagctcctcgaggaggagaaggactccaagatcaaggaggggctgctggagaacaagtgggacagcatcgagaagcacaagatcttctaccacgacctgtacaagaagtgccacttgaagctgaagcccaagatctccaaggacgacctgctggcccggaccctccagcggttcttcgaccgggtgcgggacaaggacccgtacaagttccggctgatcgccctgtcgaagaaggtggactccgacgagtacaaggacgccatcaacaacctgaagaaggtgatctgcgagaacgagatcgagatcctgaaggggatcgcgaagacgtactacgcggagcaggagaacgccaagaagggcctctgggacgagaagaactcgatcctgaagaagtgcaacctgcacaccaagcacaagatcaacctgtcccacatcatcatcggggacatcctggacgtccggatgtccccgaaggagacggaggacttctacaacttcctgaagaacacccggatcgagcggaagacgctcatcgggatcgcgtccgagtgctcggagatcctgaagaaggaggggaacaccctccgggccagcctggagacggtgctctactacaacaacaacgagcgggagctcgacaagaagcaggagtacctcttcaagatctacgagctggtggagaagggcgccaaggagatcggcaactacctggggaagaacaactcctcccggtacgccgacatctggtccttcgcccagatctacaacgtgctggagggggaccggcacggcttctccaagatctgcgagatctgccacgaggagaacgccctccggtccagcgtcatgaacgaggagggggcgacgttcacccgcctcttcgcggacagcgtccgccccttcgacggggtggtcgcccgcctgatcagcaagcaggcggacgtcatcagcgggctgatcatcaagaagatcggctcgctgaaggtgaacaacgacgaggagatcaacatctccttgatcgcggagcagaacgagttcctcttcgaggaggagctcagctccctgaaggggaagacctccgacaaggacaagtcggagtacgactccatcttcaacaacaagctcgagcggatcaagagcttcaacacctactgcccctacacgggggagaagatcggggacaacggggacatcgaccacatcctcccccggtcgtggaccaagcgggtctacggcgccatcttcaacgacgagatgaacctgatctactcgagcacccgggggaaccgggagtccaaggccaaccggccggacgggctctgggacttcgagaacctgtcggactcgttcctctcggagctgtacgacgggatcacggaccgggagaccatcaagaacacgatcaacaacacgctcgagaagctcgggatcctgaacggcgagcggaaggacaagatcgtgttcttgcggctggacaaggacacccagcgcgacctcaaggtcgcgctgttcaccccggagttccgggacaagctgatcccctacctcaacaacagcctgagcgcgaaggtgaacgggacgcaggcctacctgctcaagctcatcatcaagcggctgcgggagaagtacccgaacctgaaggccaccatcagccgggtggactcctccctgatccagaagttccggaacgacatctccaaggaggacccggccctgagcaagaaccgggagaaccagtccctgtacagccacacggtggacgcgtccatcgcgctcttcttcaacacggaggagagcgacttcaagcggtgcctgccgcccgggatcaagatcatcgaggcgaaggcccgctcccagatccacaagatcaagaagggggacttctactccacgtccgtcttcaaggacgggatctacggggagaagttcgtccccgtgatcctgttcaaggagaagctgtacttcggcttcgacacgaagaactgcgtggagatcctgaacgagaaggagacgatcttcgacctcctcaagccgtacctccggtaccggaacgacaacaagaagatcgtcaaggccttcgagaagtccttcgaggactggaagaacatctcgaagaacaagttcctccgcttcttcgtggacaagatcgccgccttcgagttcttcgagaaggtggcgaagcagccctccgacgacatggagaaggtgaccttccacctgctcgaggggctgcggtacaccacgcagaagatcgagatcatgtcgctgctgatcgacagcaacggcaagaagtacaagaccaaggagaagatcctctccaaggagaacttcaacatcgagatcaacatctcgcccctcaagatcgagaacgaggacatcaagatcgaggggagcctcaccttcccggcccggacgttcctcgagaagatcgtggactcggacgagatcaagaacaagctcgggaacgacgtcaagaacaaggaggaggacttcaagtccatcaacaagttcttgaagaacctgtacgggcggaagaacgagtccgacccgcgggtgaaggcccggaaggtcttcagcgtggacatcatcaagaacccgtccggcgggttccgcatcaagcggaagacgccggacgggacgatctaccagctcgtggagatcaaggaccgcgccacgatcgggttcgaggtgcgggacgggaagatcgacaagaactccgcgatcctccaccccgtcctgtacaacgaccggaacatcgtgccggtcggggctctctacaaggagagccccaagaacagcgtcctcatggacgactggcgggagatcacgctggaggatgacgagaagaagttcatcaaccggctgtgggtctgcccggggaccaagagccggtcctactaccggatcgagctcttgacggagcagttcaagaagtccctcttcaacaacatcacctcgttctccatcagccaggacaagcaggacgagttctacaagatcctgcccctgaagctgaagttcgatctggacaagatcgacttcctcaaggacgacaagatccggaagatcctcgtcggcccccggtcgtccgagaagaacaacatcaagcaggggtcgatgatcgtcttcgaggccacctcggagcacatcaccctggagtacgaggcgaacggcttcatgccggaggaggcgcagcggcgctacctcgaggtgaagaagaaacgacccgccgccacaaaaaaggccgggcaggcaaagaaaaaaaaggattacaaagacgatgacgacaagtaa

SEQ ID NO: 264 - DNA, 4458 bp, synthetic construct
  source 1..4458: mol_type = other DNA
atggcccccaagaagaagaggaaggtgaactcgaagctgatctgcccgatcgccatcgacctcggggcgaagaacacgggcatcgtctcggggtcgatcaccgacaaggcggagttcagcttcaagggcgcggtcatctccgtggacgacaagacgtcctggagcatgaccgaccggaccgcccggcgccaccagcgccgggggatcaagcgccggaagatggcgaagcgcctcttctggctgatcctgctccacgagtacgagatcaagtacaagaacctcacggtccggcagcaggaggccttcaacggcctcttcaaccgccgggggttcaccttcgcctccggcggggacgagaacaaggagcgggacgagatcatcaagagctccgagatcgagatcatcaacatcttcgagaacaaggtgccggagctcttcgccgacaagaagggcgacctgctcgaccggatcagccagaaccagaagctgccggagagcatcccgttcttcgagcacaagctcgacaagtccgtcttccgcgactgggcgaaggagagcaacctcatcgaggactccgagatcgaggagctctccaagtccttcgagaagacgtacaaggccctgaaggactactaccagtccgccctgcgggagcagatgggctccaagcaccggcgggagtacctggtcgagatcaagaaggacatcgacacgtacttcaagaacgaggacctctcgttctcccgcctcttcgagaagaaggtggacagcgagaagctgtaccgcctgatcgggaacatcagcaacctgcagctgcgggtgctgcggaagtacttcaaccagccggagggcgggtcgaaggagaagctccacatcgacatctgggacaaggagaagctccggatcctgatctggcggtggatcgagtcctggcacgtggacaagaacgagggcgagatccggcagtaccggtccgagatgcagtcgaaccggaacctgaagaagggcgggaacatcatctcgttcctgaccgagatctcgcccgagaagaccatcccgccgtacgaggaccagaacaaccgccggccgcccgagtgctccagcatgcacctggacgcggagaagctggacaagctgttcccggggtggaaggagctctgctgcgtgatccacgcgaacttcaagacggacatcgacatggggaagatctactcggacgacacgtgccgggaggtcaacatcgagaacagcaaggagctgtgcctgctcctgcagcggtacctcgaccgctccatgcggctcgactcgctcgagatccggaagatcgtgagcaagaacgagaaggagcggaagaactacatctcggacaagatcgagtcggtgctcgggaacaacctcaccaagctcctgtacttcgacctggcgcccaagtactacagcgagatccaggacgcccggaacgggctctgggacgagctgaaccacaacagcatcctcaagcggtgcgggaagaacccgccgcacaagaacaacatctcgcacctgctggtgggcaacatcctccagcacgacttcgacgagaagtcgtacatgaagttcatcgacgagtgctggaagacgcccatcaccgggcggaccacgctctcgtcgatgtgcgtcaagatcgaggacatccggaagcgctacgggaactcgttcaacgagttctacaaggagctcctggtgtccatcgagatccacaacaagaacgtgaagaacgagaagaagatcatcgagttcaagccgagcgacggcatcgagcaggacatctacgatgtctacaagcggatcaagcccgccagcgaggtgatctcgaagtacctgtgccacgacagcagcgtgagcgagaagtactccaacccgttcacgctcgcgcagctgtcgaacatcatcgacaaggacatccacgggttctcgaaggactgcaagatctgcagctacgagaacaagtggcggatgcagctgaacaagtacacgaccgaggacaagacggactactgcgccaacgcggtccgtctgtcctcggacacggtgcggccgttcgacggcatgatggcccggatcctggacaaccaggccgaggagatcgtcaagctgaagatcaaggagatcgacgagatcatcaagacgaactccaagtcggacctggtgatcccggtctgcatcgagcagaactcgttcaacttcacgagcgacctggccgacatcaagcggtcgagcaagcggaaggacctcctgaagcggaaggaggcctcccagaagcgggaggaggagtacttcaccaacaaggagcagcgcatcatctacgcgtccaaggggctgtgcccctacacgggggagcagctggacgtgaagggggagatcgaccacatcatcccccgcgccaagaccaagaagatcagcaacacgatcatcgaccacgaggcgaacctgatctactgctcgcggaagggcaaccagatcaagaaggacaaggagtactccctgtccaacctgaacgccaagtacctgaacaacctgtacgggacggcgaacacgaaggacatcgagacccagatcgagaccagcatcgagaagatcaagaagctgcggcagaccttcgtgttcaccgacctgtcggagaacgagcagcgggacttccggcacgcgttcttctgcgacaagctgaaggactcgctgctcgactacttggcgaaccagatcaaggcgcgggtcaacgggacccaggccttcttcgccaagctgatcatccggaagctccggaagcacctggagtccaaggggctccgggcggagttcatcgtgatcaagatcccgtcctccaaggagggcggggtctccttcatccggaagaagatcgcggagctccgggcggacatcgccaagcagccgatccagccgatctacagccacatcgtggacgcggcgtgcgtgctgtacctctcgttcaacgagaacgagatcttcaacaagatctcggcgcccgtggtcttcaagaccacggacgacatctcgctgttcgaggagatcctcccgaagtccttctcgatcgagaagggcgagaagcggaagatctacgagcgcgagacgaagatcgacttcagctcggtgcagatcttcaaggacgggatcttcgccgagcacttcgtcccggtgatcatcaacgccgagggcctgtccttcgggttcaacctgaagaaccggtccatctgcgtgaagaacgcggagctctggttcaacgagatcaaggactacctgaacctgaaggacatctaccgggacaagaccatcgaggagctggtcgtcctgtcggtgaacgggttcatccagatcagcttcgacaagacgaagtgcctggagctcctccagaaggcgagccgggacgtctcgctgtacagcgagaacgagtccaaggtgaagatcctggaggggctccggtacaccacggcccggatgaacctggaggacatcgtcttcctgaagaacaacaagaagatcaccgggatcgtggaggcgctgaagacggacctgttcaccttcaaggtgaacttcaagagcctgggcaaggacttcgggagcttccacgagctccagctgatcctgcccagcatcaacgaggcgaaggacttccacacgctgatcaagcggacctgcgacatcaccgacggggagatcgactactcggagttgttcatcaagatctacgacgagaagttcaacaactcccagcagtcgatctcctgtcggaagcagaagacgcggaagaccagcctccccgtcatcgcggcgccgtccgggggcttccggctccggcggaagaacaaggacgactcgtcgatctaccagctggtcgcgtcgaacgcgtacgtgagcggcttcgacgagaacctgaagaacatcagcatcgccaagcacttcagcaagagccggaacatcgccctcatctcggagttcaacaacttcgagaacatcaagacctcgatctcgctgaaccagtggatcacggtcgagcccttcgagccgtacatcgacatcatcgacgagatccaggcgtgcccggggaccaagtcccggttctacatcgtcctgaagctgaagaacgagacgttcctccgggacatggtcacgaaggagtacctcaactccatctcgggcaacatcctgaacgtgtacggcgtgatgaagaagaacgactacaagtcggacttcttcaagggctcgctggacaagccccgggagacgatcttcatcaaggagctgagcgacgactacatcaagctccggtacgaggcggagggccggaagatcaaggacctctacctcaagtccctgaagaacgggggcaagagacccgccgccaccaagaaggccggccaggccaagaagaagaaggactacaaggacgacgacgacaagtga

SEQ ID NO: 265 - DNA, 3279 bp, synthetic construct
  source 1..3279: mol_type = other DNA
atggcccccaagaagaagaggaaggtgatgtccacgatgtcctacatcctgggcctggacctgggcgtggccagcgtgggctggtccgtgatcgagatcgacgagaacgagatgcccatccggctggtggacctgggcgtccggaccttcgagaaggccgaggtgcccaagaccggggagtccctggccaagagccgccgggaggcccggtccatccggcgcctgatcgcccggcgggtccgccggctgctgctggccaagaaggccctcctggaggagggcatcctgacccagaacgacttcctgaccaagtccatcatcaaggacctgcccatcaacgcctgggagctccgggccaagggcctggaccacaagctcaccagcaaggagtgggccaccgtgctgctgcacctggtgaagcaccggggctacctgtcccagcggaagaacgagtccgacaccgccgacaagcagctgggcgccctgctgtccggggtgaaggagaaccacaccctgctgcaggagaacaagtaccggacccccgccgagctggccatctgcaagttcgagaaggaggagggccacatccggaaccagaacggggagtacatccacaccttcgaccggctggacctgcaggccgagctgcacctgctgttcgagaagcagcggcagttcaacaacccctacgccagcgccaagctggaggagaagatggactacctgctgatgtaccagaagcccgccctgtccggggaggccatcctcaagatgctgggcaagtgctccttcgagacccaggagtacaagtgcgccaagaacacctacagcgccgagcggttcatctggctgaccaagctgaacaacctgcggatcctgacccaggggtccgagcggggcctgaccgagtccgagcgggccctgctgctgaaccagccctaccagaaggccaagctgacctacacccaggtccggaacatcctggagctctccgagagcgagatcttcaagggcctccggtacgggaacgtggaggacaagaagatgatcgagaaggagaccctgatggagctgaaggccttccaccagatccggaaggtgctggagaaggccaacctgaagaccgagtggcagggcctggccaccaagcccgagctgctcgacgagatcggcaccatcttctccctgtacaagaccgacgccgacatcaccgcccagctgcaggacaagatcagcgcccccatcctgaacgccctgctgagcgggatcaacttcgacaagttcatcaacctgagcctggtggccctgagcaagatcctgcccctgatggagcaggggcagcggtacgacgaggcctgcaccagcatctacggggaccactacggggtgaagaccaaggaggagcacctgttcctcccgtccatcgacaaggacgagatccggaaccccgtggtgctgcggtgcctgtcccagacccggaagatcatcaacgccgtgatccggctgtacggcagccccgcccggatccacatcgagaccgggcgggaggtgggcaagtccttcaaggagcgccagaagatcgagaagaaccagctggagaacaaggccaagaaggagcgggccatcaaggagttcaaggacctgttcccctacttcatcggggagcccaagtccaaggacatcctgaagatgcgcctgtacaacgagcagcagggcaagtgcctgtactccggcaagaccatcgacatcaaccggctgctggagaaggggtacgtggagatcgaccacgccctgcccttctcccggacctgggacgacagcttcaacaacaaggtgctggtgctggccaacgagaaccagaacaaggccaaccagaccccgtacgagtggttcgacgggaagaacaacaccaccaagtggcagcagttcgtggccctggtgtggggcagccacttcaactaccacaagaagcagcacctgctgctgaagaacctgcccgagggcttcatgaagcggaacctgaacgacacccgctacgtggcccggtacctgatgaacttcatcaacgaccacatccagctgaccggcaagggcaagcggcgggtgttcgccagcaacggccagatcaccgccctgctgcgggcccggtggggcctgatgaaggtgcggggcgacaacgaccgccaccacgccctggacgccatcgtggtggcctgcaccacccccagcatgcagaacaagatcaccgacttcgtgcggtccaaggagatgaacatcttctccggcgagttcatcgaccggaacaccggggagatcaagcagatccacttccccgagccctggaactacttccggaacgaggtgatgatccgggtgttcagccacgaccccctgctggagctggagcagcagctgcccagccggccggaggcccggcaccagtacgtgaccccgctgttcgtgtcccggatgcccacccggaagatgaccgggcaggggcacctggagaccatcaagagcgccaagcggctggccgagaacgagtccgtgcagcggatcgccctcaccagcctgaagctgaacaccctggagaacatggccaacaaggacaaggagaaggccctgtaccaggcgctgaaggagcgcctggagcagttcaacaacgaccccgtgaaggccttcgccgagcccttctacaagaagggcggccagcaggtgaagaagatccgggtgaagcagatccagaagaccggggtgatcgtgcaccaggggaacggcgtggccgacaacgcctccatggtgcgcgtggacgtgttcgagaaggccaacaagttctacctggtgccgatctacacctggcaggtggccaagggcatcctgcccaacaaggccgccatcgccaacaagaacgaggacgagtggcaggagatggacgagagcttcaccttcaagttctccatccatcccaacgacctgatcaaggtcaccaccaagaaggaggtgtacttcggctactacgtggccatggaccggcacaccgccgccatcaacatccgggagcccgacctggagcgctccaagggcaaggacgggctccaccggggcatcggggtgaagaccgccctgagcttcgagaagtacgacatcgaccccctgggcaagaacatccggccctgccagcccaaggcccggcagcccatccggaagagacccgccgccaccaagaaggccggccaggccaagaagaagaaggactacaaggacgacgacgacaagtga

SEQ ID NO: 266 - DNA, 4104 bp, synthetic construct
  source 1..4104: mol_type = other DNA
atggccccaaagaagaagcggaaggtcgagcagaaggactacttcatcgggatcgacgccggcaccagctccgtgggctgggccgtgaccgatcccgcctaccacgtgatcaagaagcacggcaccgccctgtggggcgtgcggctgttcgaggaggcggccaccgccgagaagcggcggatggcccgctccgcccggcggaaccgggaccggaaggtgttccggctgaagctgctgcgggagctgttcgccgaggagatctccaaggtggaccccgccttctacctgcggctggacgagtccaagtactgggagaagaaggtggacaccaagtactgcctcttctccgacccccagttcaacgaccgggactaccaccggcagtaccccaccatctaccacctgcgggacgagctgatgaagtccgacgccccgcacgacgtgcggctggtgtacctggccgtgagccacctgatcaagcaccgcggccacttcttcctgcagatggacgaggacgtgtcccagcccgagttcggcgacggctggaccgccctggtggaggacctggagaccatcctcggcgtgcacatctcctgctgcgacctggacaagctgcagcaggtgctgtgcgacaagatgaccgtgcgggagaagcagaagcagctgaagaagctgatcaccgtgagcgacgcccccgacatgcccccgttcacctgcatccccgacctgctgagcgggaagacctgcgacgtcagcaagtccttcggcatcatgctggagggcgacgagaagaacgccctcaaggtgagcctgtccggcgaggacctctccgacgaggagaagatcgagacctaccagaagcacctggaggagaagctccagatcctggaggacctgaaggtcctctacgactggggcatcctggtgcacatcctgcacggctccgccagcatctccgaggccaaggtgaagagctacgagaagcacaagtccgacctgaagaagctgcagcggctgatccggcgggagtaccgggagaagtacgccgaggtgttccggcagaacaagaagaagctggacaactactccgcgtacaccggccactgcaagggcgtgaacgagcgctaccggtgcaaccgggaggccttctacaagtacctccagaagctgctgaagagctccaccagcgccgacgccaaggagatcatgtccgagatcgagatcggcaccttcctgcccatgcagcggaccaacgagaacagcgtgatcccctaccagatgaacctggccgagctgaagaagatcctggaccaggccgccggctacctgcccttcctgaacgagaaggacgaggccggcctgaccgtccgggagaaggtggagagcctgctgaccttccgggtgccctactacgtggggcccctggaccaccacatggccaaggagggcacccactgggccgtgaagaagcaccccgagcagcgggtgtacccctggaacttcgaggaggtggtggacctggagaagtccgccgagcggttcatggagcagctgaccaacacctgcacctacctgatcggcgagaccgtgctgcccaaggacagcgtggcctacgcccggttcatggtgctgaacgagctgaacaacgtgaccatctacggccaccggctgtccgtggacgtgaagcagcaggtgttcctggagctgttctgcgggaagaaccgggtgacccggaaggccttcctggagttcctgcggaaggagggcctgatccacaagggcgaggaggaggccgtgggcggcttcgacggggagttcaaggcctccctgaaggtgtggaaccggctgcgggccatcttcggggaggacctccccgacacggagcagatggaccagatgatcctgagcgtgctgctgctgaagcaggagcccgagatgctgaagagccggatcacccggctctaccccagcatcacccccagccagctgaagagcgtgtgcaagctgccctgcagcggctgggggcggttcagccgggagttcctgaccggcctgaaggccgacgtgccccagtacggcggcagcgactggtccatcctcgacgccctgtggaacaccgactgcaacctgatgcagctgctgtccggcgacatgccctaccaggccctgatcgaggcccacaaccgggagctgatgggggacgtgaagctggactaccagacggtcagcgggctctccgccccgcccgccgtgcggcggaccgtgtggcagaccctgcgcatcgtgcaggagatcacccacatcatgggcggggcccccaagaagatcttcgtggagatggcgcgggggagcgacggcagcaagcagaaggtctcccggaagaagcagctgagcgacctctaccagaagatgggcgaggagggcgccgagtggtgcgagaagctggaccagtacgaggacagccgcctgcgccaggacaagctgtacctgtacttcacccagatgggccggtgcatgtacaccggcgagcccatcgacctgcacgccctgctgaacgacgccggcaaccagatctacgacatcgaccacatctacccccggtccaaggtgaaggacgacagcctggacaaccgggtgctggtgaagaagaccgtgaacgtggacaagggggacaagtaccccatccagtccgagatccggcaggcccagaccagctggtggcgcaacctgcgcaagtgcggcctgatctccgagatcaagctggacaggctcacccgctccaccggcttcagcgaggacgagctggccggcttcatcagccggcagctggtggagacccggcagtccaccaagctgctggccgagatcctgagcaaggccctgcccgagagccggatcgtgtacgtgaaggccggcaacgtgtcctcgttccggcaggagaacaacatcgtgaaggtgcgggacctgaacgacctgcaccacgccaaggacgcctacctgaacatcgtggtgggcaacgtgtacgacgtgaagttcaccgccaaccccaagcggttcctgcggagcggggagccctacagcatgaagaccgacgtgctgttcgggcacacgatccggcgggggaaccagctggcctggacccccgactacctgcccgaggtcaagaagacctgccggcggaaccccatcctggtgacccggatggccgtccgccggaactccgggcggagcgggggcctgttcgaccagaaccccgtgcggggcgggaccatccccctgaagggggacccccgcatgcaggacaccaagcggtacgggggctacgacaaggagaccggcgcctacatgttcctggtggagcacggggagcccggcaagcggatccgcagcatggagcccatgtacctgcggtacgcccagcggatccaggacaactccgacgacctggccatctactgcaccgaggtgctgaagctgaaggaccccaacatcatcgtgcccgagatcaagttctacaccctgatggagtccagcggcttccggttctggctgaccggccggggcggggaccagatcctgggcatccagggcttccagctggtgctggacgagacctccgagagctacctgaagaaggtgctcaaggggtgccagaaggtgatgtccgccaagggccagatcgagctggaggagaaggccgaccgggtgaccaaggaggagaacaagaccctgtacgacgtgctgctggagaagatgcagctgcccatctaccggtcccggccggccagccaggtgcagaccgtgagcgccgggcgggagtgcttcgccgccctgaccctgaccgagcagtgcgtggccctgtccaacctggtgcagctgttccggggcaacgggcaggccgacctgaccggcatcgggggcagcaagaccgccgggtccatgaagttctccaagaagaccggcgccgacttcaagatcatctaccagtccgtgaccggcttctacagccacgaggagagcttcagcatcaaacgacccgccgccacaaaaaaggccgggcaggcaaagaaaaaaaaggattacaaagacgatgacgacaagtaa

SEQ ID NO: 267 - DNA, 4347 bp, synthetic construct
  source 1..4347: mol_type = other DNA
atggccccaaagaagaagcggaaggtcgccaagtacttcctcggcctggacatcggcaccaacagctgcggctgggccgtgaccgacgaggagtacaacctgatccgccgcaagggcaaggacctgtggggcgtgcggctgttcgagggcgccgtgaccgccgaggagcggcgccagaaccgcaccaaccggcggcggctggaccggaagaagctggagctgtcctgggcccgggacgtgttcgccgaggagatcgccaaggtggacaaggacttcctgacccggatgaagtacagcaacctgtgggccgaggacaagatcaagatgtccaacagcctgaagtccaaggacagcctgttccacgggcaggtggacggccgggactacaccgacaaggactactacatcgactaccccaccatctaccacctgcggaaggagctgacccaggagcccgccaaggacatccggctgctgtacctggccgtgcacaacatcatcaagcaccgcggccacttcctgtacggcggcaacttcggggacaacagcaacctgctggtgtccttcaacgaggccctggactgctacaagaagatcatcgaccaggaggactgcctcctgcacgtgaagaagctggaggagggcgacatcgccgagatcctggactgcatcaagtccaagtccggcatgcgcctgaccaaggccaagttcaacgagatcttcgacgccaagaccaagagccagaagatgctggtgtccgccttcgtggacggcaagatcaacctggagcagctgttcgagaccaagctcgaggagggcaagctggacttcaacgacgaggacatcgagatcaagatcaacggcctggagaacgtgctgagcgacgagcaggtgagcctgctgtacaagatccaggagatctacagcctgctccagctgaagtccatcctggccgaccacgagtacatctgcgaggccatggtggagtccttcgaggagcaccaccgccagctggagcagttcaagaagttcatcaagaagtactaccagaaggagtacttcaacatcttccggaacccccgggacaaggacagcgacaagaacgtgggctacgcccagtacgtgaactgcaacctgaccaacgggtccaagcaggtggtggacctgaacgtgtccaaccgctccaaggaggagttctacaagtacatcaagaagatcctgagcttcacccccaacgactgccaggacctggagcagttcgagaacgagcggaactactacctgtccctgatccaggaggaccggttcctgcccaagcagcggaccaagtccaacagcgtgttccccaacaagctgtacgagaaggagctgaagcagatcctgcagatctccggcaagaagttcgagttcctgaacgagatcgacaagacctgcgggctgaccaacgcccagaagctcctgcagatcctgaccttccgggtgccctacttcgtggggcccatcggccagaactccaacggccagaaccacggctgggccgagaagatcaccaacctggactacaagccgtggaccctgaacaagatcgtggacttcgacatggccgaggacgccttcatcggcaagatgaccaacaagtgcacgtacctgaaggacaaggacgtgctgcccaagaacagcatcatctactccaagtaccgggtgctgaacgagctgaacaagctcaagatcaacggcaacgacatcagcgtggagctgaagcagaacctgttcaacgagctgttctgcaacttcgccaaggtgtcctccaaggacgtgaagaagttcctgatcaaggagggcctgttcagcgccgacgagatcaacgacatccagctgagcgggatcgaccgggagttcgccaacaacttctccagctacagcaagctggccagcaactccctgttcgggaaggacttcatcgacgagcacctgatcgagatcgagaagatcatcaagtaccacaccgtgatcagcgacaagaaccggctggacaagcggctgcgccgggagttctccgggatcttcaacgaggagcagttcaagatcctgaagggcctgaacttcaaggactggggctccctgtcctacgagttcctgtgcgggctgaagttcgtgaaccgggagaccggggagatcacctccatcctggacgagatgtggaacaccaaccagaacctgcagcagatcctgaacaacgggtcctacaccctgagcgagtgcctgaccaagagcaacgagaagtccctgaagaacctggtgtaccaggacgtggagaacctgtactgctcccccgccgtgaagcgggggatctggcagagcgtgaagctgatcagggagatcgtggaggtgatgggcgagatgcccgagaaggtcttcgtggaggtgacccgcgaggacggggagaagggcgactccggccggaagtccagccggaaggagaagctggagaagctgtacaacagcaaggacttcaagaagaacgtcttcatctccagccaggagatcgcccagctcctgaaggagctgaacgacaaggacgtcacctccctgcggagcgagaagctgttcctgtacttcctgcagagcgggaagtgcatgtacagcggccagaccatcgacatcaacgacatctacaacgacaacctgtacgacgtggaccacatcatcccccagtccatcatcaaggacgacagcatcgacaacaaggtgctggtgaagcgccagctgaacgcccagaagctggacacctaccccgtgccctacgagttcatcagcaagcagaagggcttctggaaggtgctgctggacaacggcttcatctccaaggagaagtacgaccggctggtgcggaccagccccctgaccgaggacgacctcggccagttcatcgcccggcagctggtggagaccaaccagaccgtgaaggcggtgatcgacttcctgaaggtgtccatggaggatgaccggaaggtggtctacaacaaggccaagctggtgagcgagttccggcagatcttcagcatcaccaagtgccgggacatcaacgacctgcaccacgcccaggacgcctacctgaacatcgtggtgggcaacatcatcaacaacaagttcaccgacgacccccggaacttctacaagcagaagaagttcatgcccctgatctacaacaaggaggagaagatcacggagagcaacaacatcaagaaggtgttcaccggcgtggtgttcagctccgccagcacccggcccgtgtggagcgccacccgggacatcaacaagatcaagaagatctgccagcggaccagcccgctgatctccaagatgtccttcgccaacttcaacggcgccttctacaaggagaccgtgcacaagagcaacaagaacaacaagaagaccgaggccagcgtgtccctgaagggggacaagagcaaccccatcttcgacacccagaagtacggcgggtacaacaacctgaacaacgcctacttcatgctggtcgagtccaaggacaagaagggcaagaccatcaagaccatcgaggccgtgcccatcctgatcctgatcaagaacatgggcaagcccaacctgaacgagaacatcctgaagtacatctccgagacccgggggctgaacgacgccaagatcctgatcgacaagatcaacttccagagcaccttcctgatcggccgcggccggtacgtgctgggcggcaagagcgacaacgtgatcctgctgcacaacgccaaccagatgttcttcgacgacgagtgcaagaagtacatcaaggccatcagcaagtacttccggctgaaggccgacaagatcgagtcctccctggagcaggacgacgagaagatcgccctgtcccccgccagcaagaaggagaacaaggagatctacctgaccaaggaggacaacctgaagctgtacgagaagttcatcgagaagctgagctgcagcacctacgagggcatgcagctggccaccgtgctgctgcccaagctgaaggagaagaaggagctcttcatctccctcagcgtgcaggaccaggtgcaggtgctgcacgagatcaccaagcggtgctcctgcggcgccggcttcgccgacctgtccaagctgaaggacgggacctccgtggggaagatctccatcaacaagaacatcaccgacaagaacatcatcctgatcaagaacagcgtgtccggcctgttcgagcagcggatcaagctgaaacgacccgccgccacaaaaaaggccgggcaggcaaagaaaaaaaaggattacaaagacgatgacgacaagtaa

SEQ ID NO: 268 - DNA, 4092 bp, synthetic construct
  source 1..4092: mol_type = other DNA
atggccccaaagaagaagcggaaggtcaagaagtacaacatcggcctggacatcggcaccacctccgtggggtgggccgtggtggagaaggagaacttcaaggtcatgaagaagggccgcaagaagatgtggggcgtgcggctgttcgacgaggccacctccgccgccgagcggcgggggtaccgcaacacccggcgccggtacgaccggcgccggaagcggatccagctcctgcagaaggagttccagaaggagatgaacctggtggaccccaacttctaccagaagctgaaggaggccttcttccacgagtgcgacatcttcaacaagaccaccatcatctcccaggaggagaaggagcagatgaagacctactacaagctgtaccccaccatctaccacctgcggaacgagctggtgcacaccaccgagaagatcgacatccggctggtgtacctggccatccaccacatcgtgaagtaccggggcaacttcctgtacgagggggccaagttcaacaccagccagctgcagctcaacgagaagatcaacgagctgttccacgtgatcgacatcaccaacgggaccatcgagcaccactccgagatgatcgagctcctggacagcctgaagctggaggaggccctgctgctggagaacaagaacgagcagcggatctacatcaaggaggccctgcagaactacttcagcaagaacttcatctccgagttcaccaagatgatcctgggcgacaacttcagcgtggccaagctgttcgacgtggagctggaccccgacatcaagctgaacttcaaggggtccgactacgacgagaagttcgcccagctggagaaggagatcggcaaccagatcgacatcctgaaggagatgaagtccctgtacgacatcctgttcctgaagaagctgctggagggggaggacgaggggaacatctccgccatcatggtgaagcggtaccagacccacaagcaggacctgaacctgctgaagtccgtgctgaagcagaagaaggagacctacaagcaggtcttcaagagcaaccagaagctgtgcctgtacgagcagtactgccacaaccacatcacctacgacgagttcaccaagaagatcctgaacttcctggagaaggaggacatctccgacaactccatcctgctgaagaagcggatcgagaccgggaagttcctgcccaggatcaccaacatcgagaacgggaagttcccgtaccagctgaactacagcgagctgatctccatcatcgagaaccaggggatctactaccccttcctgaaggagaaggagaacaacacctacaagctgatccagctgctgcagttcaggatcccctactacgtggggcccctgaacaacaccaccaacaccctgaagaagaactccaacgcctgggccatcaagaaggagaacgtggcctgcatcaccccctacaacttcaagaaggtgatggacctggacgccagcgccgaggagttcatcctgcggatgatcggcaagtgcacctacctgctgaaggagaaggccctgcccgaggcctccatcctgtacagcaagttcaaggtgctgaacgagctgaagcagatccgcatcaacgggcggaagctggagctggagatccagcagaagatctacaaggacttcttcctgaagaacagcgggaacctgaccgacaaccggttcaagaccttcctgtaccagatgcccgagatgcggatgtacgacgacctgaccatcaccgggtacagcgccgacatgaagttcgccaacacgatgcagtcctacatcgacttcttcggcgagaacggcatcttcgagggcacctcctacgacgagaaggacgccgagcagctgatctcctggatcaccatcttcgaggaccaggagatcctgaagcggaagatcgaggcccactacagcctgaacgagaccaagatcaactgcctgctgaagaagaagtacaagggctggtccaacctgtccaagcggctgctgatcaccaagtactaccagaacagcaacgccatcaccaagcagtccatcctggacctgatggagaccaccgaggagaacttcatgcagatcctgtacaaccggaagtacaagttccaggacatgatcgcccagatcaacgggaacgagatgtcccagaagctgaactacgaggtggtcagcgagctggccacctcccccgccgtgaagaaggggatctaccaggccctgctgctggtggaggagatcatctccatcatgggctacgagcccaaccagatcaccatcgagatggcccggggcgacgagaagaaggagcggaagtccgaccgcaagaagtggatcgagaacctgttcaccaagtgcaagcagcagatcaccaactacaaccagctcaagaaggagctggaccggttcgagtccatcgactcccagaagctgttcctgtacttcatccaggagggcaagtccctgtactccgggacccctctggacatcgagaagctgaacagctacgagatcgaccacatcatcccccggaccctgtggaaggacgacagcatcgacaacaaggccctggtgctgaagaaggagaaccaggagaaggccgccgccttcgtgctgccgtccaagttccgcaacgacgccatgcggaagtggtgggaccacctgaagctgaacgggctgatcagctccaagaagtaccacaacctgtgccggtccaagtacaccatcgaggacatcgaggggttcatcaaccggcagctggtggagacccgccagatcaccaagaacgtggccaacatcatccagaagtaccaccccgactccaagctgatctacatccccgccagcctcagccacaactaccgggagaagttcgagctgttcaagttccgggagatcaacaacttccaccacgcccacgacgcctacctggccgccgtgctgggggagtacaaggtctcctacctgaaggaggccatggactacgagcagctgaaggagctgaccacccagtggatgaaccacaagaactacaaggagctgaactacggctacgtgatcaactccctggacaacaagttcccccggtacgacctgaacggggagatcgtgttccaccccatcgacttcaaccagacggtgaagaacaccctgtaccagaacgacgtgatcatctccaagaagaccgagatgaagacgggcaagttctacaaggagaccatccactccaagcgggccaaggggaacaagctgtccctgaagaaggggctggaccccaagctgtacgggggctaccaggacatcgaggtggcctacaccatcctggtgtactaccagaaccagtacaagctggtgggcatccccatcctgatctacaagcaggcccagaagaacaccgacatcatcatggagtacgtgaaggagcacctgaagctgaaggagaacgactcctgcaccctgatcaaggacaagatcttcttcaacaccctgttcctgtacaagggccagtacgtgtacctgcgggggtacagcaccgagtccaaggggtgcgagatcgccaacgccaccgagctgaagatcccccgcaagaagatggagcagtggaagtacaccctgaactacgtgctgaacgacaagaaggtgcccaacaacctggaggagctgctgaccgaggacaagatcgaggcccagatgaacgagatcatccagtggctcctgtccaagcaggagtactaccccctgtacaccagcgccatcgagaagatcaagaccgtgttcaacgagatcaacctgagcttcgaggagcagaagcgggtgatcaaggagctgttcatcctgtacggcacctcccggaacgccaacctgagcttcatcgagaacggcggcctgtccgaccggatcggccgcctgagcgggaagaacgtgaaccacggcatcatcttctaccgctccatcagcggcctgaaggagcggtactacgagttcaaacgacccgccgccacaaaaaaggccgggcaggcaaagaaaaaaaaggattacaaagacgatgacgacaagtaa

SEQ ID NO: 269 - DNA, 3366 bp, synthetic construct
  source 1..3366: mol_type = other DNA
atggccccaaagaagaagcggaaggtcaagcagctggtgctgggcctggacatcgggatcaccagcgtgggctacggcatcatcgacatcgagaacaacgagatcgtggactgcggcgtgcggctgttcaaggagggcagcgccgccgagaacgagacccgccgcgagaagcgggggtctcggcggctgaagtcccgcaaggtgaaccggatccaggacatggagaacctgctgaaggagctgggcatctacgagaactgcaacctgatccacaacaacccctacgacctgcggatcaaggggctcagcgagaagctgaccaacaaggagctgacccgggtgtgcctgcactacgccaagcgccggggcagctccctggacatggtcgaggacgacgagaccaaggccaaggagctgggcgagaccaagaagatcctgcaggagaacgacatcctgctgaagcaggggtactacgtgtgccaggtgcagaagatgaacgagcagaagtacgggaagatccacggcaactacaacaacttccgcaccagcgactacctgaaggaggccaagcagctgctgagcatccagggcctgaaggaggagaacatcgagaagatcctgaacatcatccagcgcaagcggcagtactacgaggggcccggctccctgaagagccccaccatctacggccgcttcatcgaggaggacggccgcatcatcaagatcgacctgatcgagaagatgcgggggcactgcagcatctaccccgaggagctgcgggcccccaagatgagctacagcgccgagctgttcaacttcctgaacgatctgaacaacctgaagatcgacgaggagaagatcacccccgagcagaagcaggagatcatctccatcatccagaccaagaagaacatcacgcccctgcagctgagcaagttcctgggcgtggagatcgagaagatctccggcttccgcatcgacaagaaggacaagcccatcctgaccgagttcaagggcttcaagatcatcgccaaggtcctggagaagaacaacgagaaggagctggtgaaggacgtgaagttcgtggactccatcagcgagatcctgacccgcaccaaggacatccaggagcggatcgagagcatcgagaagctcaacgacaacctgtccaaggagtgcatctactccctggccaacatcaccgggatccggggctaccacagcctgagcctgaaggccatctacgagatgaacgaggagctcctgaacaccgagatgaaccagatgcagatcctgcagtccagcaagaagctggagcagaagatcaaccagaaggggaagaagaacatccaggaggacaacaccgccatcctgtcccccgtggccaagcgggccatccgggaggccatcaaggtggtgaacgccgcccggaagcgctacggggagttcgactccatcgtggtggagaccacccgggacaagaacagcaaggagcagaagaagcgcatcgacgacgcccagaagtacttcaagaagcggcgcgaggaggtggacgaggtggtgaacgggcggcccctgaacgccaagacccgggagaagatccggctctacatggaccaggacggcaagtgcgcctactccctggagcccatcgacctgaacctgatcatgaacgaccccaccgcctacgagatcgaccacatcatccccatcagcatctccctggacgacagcttcaacaacaaggtgctggtgcgccggaaggccaaccaggacaaggggaacgagaccccctacaacgccatcaagcagggcaagatcaagaacaagaacctgaagtccgtgagcatccaggagtaccaggcctacgtgctgaacctgcgcaaggagaacaagatctccaacaagaagaaggagtacctgctgtcccagaaggactacaccaagctggacgtgcggaaggagttcgtgaaccggaacctgatcgacacgtcctacgccaaccgggtggtgttcaacaccctggaggactacttcaagcagaacgagatcgacaccaaggtgcacaccatccggggcgccgccaccagcgccttccgcaagaaggtgaacctgcagaaggtgcgggaggaggaccactcccaccacgccatcgacgccctgatcgtggccagcatcaagaagctgaacctgctgaacaagctgctggacgtgaagaacatcaaggacgtgtacgacgacgagaccggcgagtacctgcccatggacgacaactcctacttcgaccccaagtacatgaacttcatcaaccagctgaaggacgtgaagatcaccaagttcagccacaagatcgacaccaagcccaaccggcagatcgccgacgacacgatctacagcacccggatcatcgagggcgaggagaagctgatcaagaagtacggggacatctacgaccccaagttcgacaagctgaccaacgacatcctgaacgagagctaccagaacaagtacctgatggccatccacgacagcaagaccttcgacaagttcatcaacatcgtgcaggaccactacaacacctacaaggacgacagcaagatctacaccctggacaaggggaagatcaagctgaagggggacaaccccctgttcctgtacaagaacgagcacgggttcgtgaccaagtacagcaagaagaacaacgggcccgccatcacccagatgaagtacgtggactgcaccctgggcaaccggatcgacatcaccagcaactacaagatcaaggacgacaagaaggtcgtgctgcagcagatcagcccctaccggaccgacttctacctggacgaggacggccactaccagttcgtcaccgtccggtacagcaacatcaagtggaaggccacccagcagagctacatcatcgacaaggagtggtacaagaacgccaagaagcagaagggcatccaggagaacgccaagttctgcttctccatgcaccacgacgagctgatcggcttcatcaaggaggacggcgagaagctgatctacaacgacgagcacaacctgatcaacatcatgaaggagcacaacggcaaggactacgagatcctgaagttcaccgccaccaacaacgagggcaagaacatcgtcgaggtgaagccgatctacaagtacaccagcgaccggatcaagcccctgatcaacaagaagatcatcaagctggccaagttcgccaccgaccccctgggcaacctgtacgaggtgaaggacagcaagctgaagctggagctgaaacgacccgccgccacaaaaaaggccgggcaggcaaagaaaaaaaaggattacaaagacgatgacgacaagtaa

SEQ ID NO: 270 - DNA, 4164 bp, synthetic construct
  source 1..4164: mol_type = other DNA
atggccccaaagaagaagcggaaggtcgaggagaagaagaagtacaacatcgggctggacatcggcaccagctccgtgggctgggccgtggtcgagtccggcacccagaagatcatcaagaaggggaccaagaagtcccgcaagtccctgtggggcgtgcggatgttcgaggaggcctccaccgccgccgagcggcggctgtaccgctcctcccggcgccggtacgaccggcgccggaaccggatcaagcggctgcagaacgagttcgagtccgagatctccaaggtggacaaggacttcttccagaagctgcgggagtccaagtaccacaagaacgacgagcagaacaagaagatcgtgctgtcggactacgagaagaacaagatcaaggagtacaacgagaactacaagaccatctaccacctccgcagccgcctgatccacgactccagccaggaggacatccggctggtgtacctggccatccaccacatcatcaagtaccgcgggaacttcctgtacgacaccaaggagttcaacgtgaaccacctgaacctggtgaacagcctgaagatctgcttcgcctccctgagcgacttcttctccaacctgaacttcagcgagaactacgaggaggtgatcgacttcgagaagctggccaacatcctgatgaagtccaccaagaacgacatcaggatcagcatcaagcagctgctggagggcatctgcgagaacaagaagttctccaccgagttcgggaagctggtggtggggaacaagttctccctgaagaacctgttcctgctggaggagctggagaccgacatgaccatcagcttcaacggcaccgactacgaggacaagtacaacgagctggaggagctcctgggggacaagatcgaggtgctgaacgccctcaaggagctgtacgacatcatcttcctgaagtccctgttcaaggacagcgacaccctgctgctgtccgacctgatggtgaagcggtacaacctccacaaggaggacctccgcttcctgaagcagatgctgcggaacacccgggacctgtacaaccaggtgttccgcacctccaaggagacctgcctgtacgagctgtacatccacaaccagatgacctacgaggagttcgtgaacaagctgcagaagatcatgagcaaggtgttcatcctgaacatcgacgagcagatggagcagaagtacaagaaggaggtgcagccccgcatcgagaacgggggcttcctgcccaagatcaccgactgcgacaacgggaagtacccctaccagctccacaaggaggagctgatcaagatcatcgagaaccaggggaagtactaccccttcctcctggacaaggtgaacggggagtacaagctgctcaagctgctcgagttcaacatcccctactacgtggggcccctggtgaccgaggacaagtcccccttcgcctggatggagcggaagaaggacggggtgaagatcaccccgtacaacttcgacgaggtggtggacaaggaggccaccgccgagaagttcatcaagcggatgatcagccactgcacctacctgctgaacgagtacgccctgcccaaccactccatcctgtacagcaagttcaaggtgatgaacgagctgaagcagatcaagatcaacaaccagaagctggacaaccacctgacccagaagatcatcaccgagctgttcatgaagaccaacgggtccatcaccgacaagcggttcaaggagtacctctacaccctgaacgagttcgacatgttcatgggcgacatcgagatcaaggggtactccgccgaccacaagttcgccaacaacatgcagagctacgtggacttcttcggcgagaacgggatcttcaactccacctcctacaccgtggaggacgccgagaagatcatcgagtggatcaccatcttcaaggagaaggacatcctggagaagaagatccgggacgcctaccccgacctgctggacaaccaggtgaagatggccctgagccgcaagtacagcggctgggggcggctgagccgcaagctgctgaccggcctgttcatcaaggacaagaagtccgacgtgcccaagaacatcatggacttcatgcaggagaccaacgagaacttcatgcagatcatcaacaacgagcactacaagttccagaagctgatcgacgagaacaacctgatcaaggagaccaagaagatcaactacgacctggtgaaggacctggtcaccagcccctccaccaagaaggccatctaccagagcctgaagatcatcgaggagctggtgaactacatgggctacgagcccgagaacatcatgatcgagatggcccggggcgggggcaagaaggagcggaccatcgaccgcaagaagtacatcgagaccctgtacaagaacctggagagcaacaaggccaccacctacttcaccaacttcgaggtgaccaaggaggagctgaagaagatcgagaagatcgacagccagaagctcttcctgtacttcatccaggaggggaagtgcctgtactccggggagcccatcaacatcgaggacctctccaactgcgagatcgaccacatcctgccccggaccctgatcaaggacgacagcatcgacaacaaggccctggtgtaccgcaactgcaaccagaagaaggccgcctccttcgtgctgcccccggagtaccggaacaaccaccgcaagaagtggtggaaccacctgaaggagaacggcctgatgaccgagaagaagttctaccggctgacccgggagttctacaccgacgaggacatccagaacttcatcaaccggcagctggtggagacccggcagatcaccaagcacgtggccaacatcatcaagtccctgtacaagaagaccaaggtgatctacctgaaggccgagctgtcccaccactaccgggagaagttcgccctgttcaagttccgggagatcaacgactaccaccacgcccacgacgcctacctggccgccgtgctgggcgagtacaaggagaagtacctgaagcggaacgtgaacttcgagatgatcaaggagatgaactaccagctgcggatgtccggcgaccggaaccagctgaagtacgggtacttcatcaactgcctggacaagaacgtcaacgacatcgtgatcgagatgtgcaagtccatgatcgacgactccaccggcgagctgctgttcgacgtggtggagttcaacaagcggatcgaggacgccctgtaccggaacgacatcctggtgaccaggaagaccgagatccgcaacggcaagttcttcaaggagaccatctaccccaagaaggtggggcggatcaagatcaaggagaacatgcccacccacctgtacggcggctacagcaacatgcagaccgcctacctggtgctgatcaagtacggcaagaaggtgaagctgatcgggatccccgtggacatccacctgaagtcccggaaggactccaccatcaagttcaacttcatcaaggagcacctggacgtggacaccttccagatcctgaaggaccacatcccctacgagtccttcatcgactacaaggggcagaaggtctacatcaagggctacagcgtggccaacaagaactgcgagctgtgcaacgcccggcagctgaagatcccccgggagaagatgaagaactggcgctacgtgctgaacaaggtgctcaacaaggtggacatcccctgggagaacgacgaccccatcctgtccgacgacgagatcatcaaggtgatgttcgagatcatcatgtacctgtaccagcagaaggagaactaccccctgttcatcaacgagatcaaccggatcgaggagaagatcggcctggagaacctcgactacgaggccctggccaagatcatctcccagctgttcaccatctaccactgcgacagcatccacggcaacctgaaggagttcggcctgaaggaccggatcgggcggctgtgcggcaagaacatcgagtccggggccatcatcagccggtccatcaccggcatccgggaggaccagtacgagttcaaacgacccgccgccacaaaaaaggccgggcaggcaaagaaaaaaaaggattacaaagacgatgacgacaagtaa

SEQ ID NO: 271 - DNA, 4362 bp, synthetic construct
  source 1..4362: mol_type = other DNA
atggccccaaagaagaagcggaaggtcgacaagaagccgccctactacatcgggctggactgcggcaccaactccgtggggtgggccgtgtccgacaagaactaccacctgctgaaggggacccaccacatcaagaccgagaaggggaccaagaccaagaagcagaccctgtggggcttccggctgttcgaggaggccgagaccgccgccgagcggcggatccaccggtccgcccggcggcgggccgagcgcgccaagaaccgcctgaagctcctgcggatgctgtttcacgacgagatcgtgcaggtggaccccgagttctaccagcggctgaaggagtccttctacctgctggacgacaagaagctgcagaagaacagcaagaacacgctgttcaacgacagcaacctgaccgacaaggacttccacaagaagtaccccaccatctggcacctgcggcaggccatcatcaacgccaaggatgacgaggccttcgacatccggctgtacttcctggccatccagcacatcctgaagcaccggggccacttcctgatggagggggagatcaactccgacggggacgtggacttcgagtccatcttcgagaacttccggtgcgaggccgagcgggtcggctacaacatcgccgacgtgccggccgaggtgaaggagctgctgatgcagaagatgtccaagacggacaagaagaagtccctcaaggacatcctgtacatcgagggggacgagctcgacgacgacgtccccaagggccagctggagctggccgggctgctggtcggctccaaggtggacctgaagaagatcttctccatcaacgacgacgagaagttcccctactccttcagcgagggcgccttcgaggacaagctgcccgacatcgagatgaccgtgggcagcgagaacctcgacctgatcttcgccgccaagaagatctacgactacgtgaccctggacaacctgctggccggcaacaagctgatcagcgacgccatggtggccaactacaaccagcacagcaacgacctgaagaagctgaagcaggtgttccggccccaccgggaggtctacgacaagctgttcaagaccaagctgtacaacgagaagttccccagctacgacgcctacatcagcaaggcctacaccgaggacaagtccgggcggaagtcctcgaagaacatcgggcaggaggacttcaacaagcacctgcacaagctgctggaggagatcaagaccaagaccaagcccgagctggactccctggtggacgagctgctggaccggaccgacaccagcgagaagtccgtgtccccgctgctgctgcccaagcagcgggggcaggccaagggcaccatcccccagcagctgcacggcaaggagctgaagtacatcctgcagaagctgcagaaggactacccgtccttcgccgaggtgacccccggcgaggacgagtcctgcaacaccaaggccaagaagatcatcaagatccacgagttccggatcccctactactgcggccccatcgtgaagcggaagttcgacgatgacgggaagcaggtggccaacggcaagagccagttctcctgggccgacgaggagatcgccgagctggtgtacccctggaacttcgacaagctgatcaagaaggagcagcgggccaacaacttcatccgccggatgaccaacgagtgcacccacctggtgggcgaggacgtgctgcccaagtgctccctgatctaccagaagtacatgatcctgaacgagctgaacaacctgaagatcaacggctaccggatcgacaaccagctcaagcagcagatcttcgagcgggggtacaagaacaacgagatcaagggcaacatcaccctgaagaagctggagaagtggtgcaaggacaacgccctgatctccatcaacgacgagatgagcggcaccagcgaggtgaagaccctgcccaagtaccagacctaccaggacttctcccggatcctgggcaccgacttcgcccacaagtacagcgccaacaagctggagaaggtggtggagtccatcaccgtcctgggggacgagaagtccatgctgaagcagtccatccaggagatcctgaactgcgacgccaagacggccaactccctgtccaagctgagctacaaggactgggggcggatgtccgccaagttcctgaacgggatcaccgtgaacgaccggaccatcctggactacctgtgggaggacaacaagaacctgatggagctgctggggcaggaggtgggcttcggcaagatcgtggaggagtacaacaagtccaagcggcccgtcaccaaccggatcacctaccacgacgtggagtccctgtactgcagcccagccgtgaagcggtccgtgtggcagaccatccggatcgtggacgagctggtgaagaacctgcagtacgcccccgagaagatcttcctggaggtgacccggggcgaggacaagaacgccaagggcaagtacaccctggcccggcggaaggacctggagaccaagctgaaggccgtgaagaccgacgacgcccgggccatcctgaaggagctggacggctacgaggaccgggacctccagagcaagaagctgttcctgtacttcagccagatggggaagtgcgcctactccggcgagcccatcagcctggaggagctgaacaacagccagctgtacgacatcgaccacatctacccccggtccaagaccaaggacgacagcatcacccggaacctggtgctggtgaaggccaacctgaaccgggagaagaccaacaactaccccatcagcgacaccatccggaacaagatgcacggcatctggtccgtgtggtaccaccagggcctgatcaccaaggagaagtacgagcggctgacccgggccaccccgctgaccaacgacgagctgggcagcttcatcgcccggcagctggtggagaccagccagtccgtgaaggccatccgggacctgctgaagcaggcctaccccaagaccaagatcgtgatggtgaaggccggccaggtgtccaacttccggcacctgatgtcccgggacaagaaggaccgggacggcaacatctacgagcccggcaagcccgagttcatcaaggtgcgggagatcaacgacctgcaccacgccaaggacgcctacctgaacatcgtggtgggcaacgtgatgaacgagaccttcacggacaaccccaacgagtggatcaagcggcgggccgggaaggagtactccatcaaccccgagcgcatcttccgggccagcaagacctaccggaaggccaacggggaggagacctcctaccccgaggtcaacggctggaacttcgccgagtccatccaggccgtgtccaacacgatgcggcggaacgacgtgatctggacccggatgaactacatcgagagcggggagatcagcgacctgcagctggtggggaagtccaacaaggccgacggcctgctgcggatcaagcagcaggagcggctggaccccaagaagtacggcggctacaactccctgaagggcgcccacttcgccctgatcgagtgcaaggacaagaaggggaacctgcagcggtgcatcgtgcagatccccatcatcgccaagaacaacatcgagaactacatcgccgagaactacaccgacgcccaggtgatcctgcccatcatcaagtacaagtccctgctgaaggccgacggcctgctgctgaccatcagcaacaaggactccgacctgaagaacgggtaccagcacgccgtgcaggccaagttccagcagagcatcagcccctacctgaagaccatctgctccatctgcgccaaggacaagctggcgcggaacaactaccagatctccaccgaggacaacgtgaacgtggagcacaacctccagctgttcgacgagttctgcgacaagatgaagatctacagcgggtaccccgagctggccggcggcatcgagaagatcatgctgtcccggaccaccttcagcgagctggacctgaagcagcagtgcctgaccctgggccagatgatgttcatcttcgcctgcaaggcccagaacgccaagctgaacaccatcggctgcggcgacagcgtggggcggatccggatcagcaacaacaagctgttctcctacaacaacctgcacctgatcaaccagagccccaccgggctgtacgaggaggtgatcgacctgaagaccgtgcggcccaaggtgaacaagcaggaccgggagaaacgacccgccgccacaaaaaaggccgggcaggcaaagaaaaaaaaggattacaaagacgatgacgacaagtaa

SEQ ID NO: 272 - DNA, 4236 bp, synthetic construct
  source 1..4236: mol_type = other DNA
atggccccaaagaagaagcggaaggtcgtgctgcggcagctgcacaacacgatgtaccggcggtactgccagctgaacagctccgagaaggtgaagaagtacaacatcgggctggacatcggcaccaccaccgtcggctgggccgtggtggaggagaacacccagaaggtgatcaagaagggcgaggcccgcaaggccctgtggggcgtgtccctgttcgaggaggccaagaccgccgagaagacccgcagcttccgcggcacccgccggcggtacgaccgccggcgggagcggatcaacctgctccagtccgagttcctggaggagatcaacaaggtggaccagaacttcttccagaagctgaaggagtccaagtaccaggaggacgacaccgtgaacaagtccatcatcctgagcgccgccgagaagaagaaggccaaggagtacaacaacaagtacaagaccatcttccacctgcggagccggctgatccacgactcctccaaggaggacatccggctggtgtacctggccatccaccacatgatcaagtaccggggcaacttcctgtacaacgtggagaacctgaacaccaacaagctggacctgaccgacaggctgaagagcgccttcgacagcctgatggacctggccagcaacctgaacatcatggagaactacgagaaggtggtctccatcgaggagatcaccaaggccatcatgaaccccagcaagaacgacatcaaggtgaaggtgaaggagctgctggtgaacctgtccgacaacaagaacttcggcagcgagttcgggaagctggtggtcgggaacaagttctccctgaagaagctgttcatgctggaggagctggagaaggacatctccatctccttcgacggcaccgacttcgaggacaagtacgacgagctggagaacaccctgggcgacgccatcgaggtgatctccgtgctcaaggagctgtacgacaccatcttcctgaagaagctgttcaagggcaaggccaccagcagcctgagcgacctgatggtggagcggtacaacgtgcacaaggaggacctgcagttcctgaagcagctgttcgacaaggaccggaagctgtacaaccagctgttccggaccaaggagaaggcctgcatctacgagcagtacatccacaaccagctgacctacgaggacttcatcaaggggctgaagcggctgctggagaacatctccgacatcagcatcaacgacgacctgcgggacaagtacacccgcgagatccagccccggatggacaacggggagttcctgccccggatcaccgacctggagaacgggaagtacccctaccagctgaacaaggacgagctggagaagatcatcgagaaccaggggaagtactaccccttcctgaaggacaagatcaacgacgagtacaagatcgtgaagctgctgaagttccggatcccctactacgtcggccccctggtgtcctccgacaagagccggttcgcctggatggagcggaagatcgacaaggtgaagatcaccccgtacaacttcgacgaggtgatcgacaaggagaccaccgccgagaagttcatcaagcggatggtctcccactgcacctacctgctgaacgagttcgccctgcccaaccactccatcctgtactccaagtacaaggtgatgaacgagctgaagcagatccggatcaacggcaccaagctgtccgacctgaacaccaagctccccaacaagatcatggaggagctgttcatgaagaccaacggctccatcaccgacaagaagttcaaggagtacctgtactactccaacgagctgacgatgtacgagaacgacctgatcatcaccggctacagcgccgacggcaagttcgccaacaacatgcagtcctacgtggacttcttcggcaagaaggggatcttcgagaacaccagctacaacgagaacgacgccgacgagatcatcgagtggatcaccatcttcgaggaccgggacatcctggagaagaaggtgcggaagaactacagcctgctgtccgacacccaggtgaagaagatcctgagccggaagtactccggctgggggtccctcagcaagaagctgctgaccgagctgaccatcaaggacaagaagtccaacatcagcaagaacatcatgaccctgatggaggagaccgacgagaacttcatgcagatcatcaacaacgacgagtacgacttccagaagctgatcaaggagaacaacgtgctcaaggacaccaacaagatcaactacgacctggtgaaggacctggccaccagccccgccaccaagaagggcatctaccaggccctgaaggtgatcgaggagatcatcgactacatcgggtacgagcccgagaacatcatgatcgagatggcccggggcgaggacaagaagaaggccaggaaggacgacaagaagaagtacctgcagaagctgtaccagacgatgaaggaggagaaccggatcgacgacttcgacaactacgacgccatgtcgaagaagctgaacaaggtggacaacatcgacagcgagaagctgttcctgtacttcatccaggaggggaagtgcctgtacagcggggagccgctgaacatcgaggacctgaactccgccgagtacgaggtggaccacatcctcccccggaccctgatcaaggacgacagcatcgacaacaaggccctggtgtaccggaagtacaaccagaagaaggccgccagcttcgtgctgccgtccgagtaccggaccgggtacatgaagaagtggtggagccacctgaagaagaacgggctgatctccgccaagaagttcgaccggctgatccgggacagctacaaggacgaggacatccaggggttcatcaaccggcagctggtggagacccggcagatcaccaagcacgtggccaacatcatcagcaacttctacaagaagaccaacgtgatctacctgaaggccaacctgagccacaactaccgggagcggtacgagctgttcaagttccgggagatcaacgactaccaccacgcccacgacgcctacctggccgccgtgctgggggagtacaaggagaagttcatgaagaaggacatcaacttcgtgatggtcaaggagatgaacgaccggctgcggtccctgggcaactacaagcagctgcggtacggcttcgtgatcaactccctggacgagcaggtgtccgacatcgtgaccgagatcagcaagagcatgatcaacaaggacaccggcgaggtgctgttcgacgccaagcgcttcaacaagcaggtggagaagaccctctaccgcaacgacatcctggtgtcccggaagaccgagatccgcaccgggaagctgtacaaggagaccatctaccccaagggcatcggcaccatccccgtgaaggagaacatgcccaccaacctgtacgggggctactccaacgtggagaccagctacctggtgctggtgcgctacgggaagaagaagaagctgatcggcatccccctggagatcgccctgaagtccaagaaggacatcaacaagaagtacagcttcatcaaggagcagctgaacgacatcgacgacatcgaggtgatcaaggacttcatcccctacgagaccctgatcaactacaagggccagaaggtccacatcaagggctacagcatctcccacaagaactgcgaggtgtccaacgccctgcagctgaagctgcccagcaacaaggccaaggagtggaagtacgtgctgaacaaggtgctgaacaagaagaacatccccatcgtgaacgacatccccatcgtgagcgatgagctgctcaacgagacgatgaagaagatcatcctctacctgtacgagcagaagaagaactaccccctgttcgagtccgagatcaccaagatcgaggagaagatcaacttcaacgagatgaacatcgacgagctggagaagatcatcgtgcagctgttcaccatctaccactgcaacagcgtgaacggcaacctgaaggacttcgggctgggcgaccggatcggccggctgttcagcaagaccatcgactccggcatcatcatcagcacctccatcaccggcatcaaggagagcaagtacgagttcaaacgacccgccgccacaaaaaaggccgggcaggcaaagaaaaaaaaggattacaaagacgatgacgacaagtaa

SEQ ID NO: 273 - DNA, 4218 bp, synthetic construct
  source 1..4218: mol_type = other DNA
atggccccaaagaagaagcggaaggtcatgtactacggcggcatcgacctgggcaccagctccgtgggctgggccctgaccgacgagcactaccgcctgatccacaagaagggcaaggacctgtggggcgtgcggctgttcgacgaggccgagtccgccaaggagcggcggagctcccgggtgagccgccggcggcgcgcccgggagaccgcccggatcggcatgctgcgggagtacttcagcgccgagatcgagcagaccgatcccggcttctaccagcggctggaggagtccaagtaccaccgcgaggacaagcggaccaaggagaagtacgccatcttcgccgacggcgacttcaccgaccgggagtactacaagacctaccccaccatcttccacctgcggaaggagctgctggagagcaccgagtggcacgacgtgcggctggtgtacctggccgtgctgaacctgttcaagcggcgcggccacttcctgaacgagtacctcggggagaccgacaaggagggcggcatggacgagctgtaccgcaccttctgcgactccctccccgaggagctcgagctgaagttccccgagctgtgcgccgccgccgccgacttcgagcagatcctgggcaaccgggatctgtcccggagcgggcgggccgaggagctcctggccttcctgggcatgaccaagaaggagaacaagaaggagttcgagctggtgaagatgttctgcggcctgagcggcaagctggccgtcatcttcggcaaggagagcctcggcagcgagttcgagaagaaggagctgtccttccggagctccgcctacgaggagacgatgaccgagatcggcgacatcctcccccaggagtacctggacgtgatcgaggccgccaagaacatccacgacaagggcctcctgggggacatcctcaagggcgagacctacctgagcatcgcccgggtggccagctacaagaagcacaaggccgacctgaccctgctgaagaagaccctgaagaagtactgcaagcgggaggagtacgacgcctacttcagggtcatggccgacgacaactacagcgggtacgtcgggtccgtgaactccgagaaggagcgctccggcaaggacggcctgcagcggggcaagttccggcggaaccggaacgccaagaaggagaactacaagaacttctggaagaagaccaaggagctcctgaaccagatgcccgaggaggacgaggacgtccggtatctgaagcaggagctcgagaaggagaccttcctgcccaagcagctgacctccgagaacggggtcatccccaaccaggtgcacctgagcgagctcaagaagatcctgagcaacgccgaggggtacctgcccttcctgctggagaaggacgagagcgggctgaccgtgtccgagcggatcgtgcgcctgttccagttccagatcccctactacatcgggcccctgtacatccgggagggcgaggaggggcggaagtgggtgaagcggaaggagggcggcaaggtgctgccctggaacatggaggagaaggtcgacctggccaagacccgggaggccttcatcaccggcatggtgcgccggtgcacctacatggagggcaagtacgtgctgcccaagaacgccctgctgtacgaggccttcatggccctgaacgagctgaacaacgtgcggatccacggggagaagctgcccgtggccctgaagcagcagatctaccgcgagctgttcatgaccgggaagcgcatcacccacaagcgcttctgggagtacctggtggccgacggccagctgtccaaggaggacaccgatgccatcagcggcatcgacggggacttcaagcagtccctggtgtcctacgggcggttctacagcgtgttcggggaggagctgaagaaccgcgacatctgggacatggccgagcagatcatcttctggggcaccgtgtacagcaacgacaagaagctgatgaaggagctgatcaccgagaccttcggcgagaaggcccagaagaccctgctcagcgaggcccagatgaagcggatctccggctacaagtggaaggactggggccggctgtccgccgccttcctgaccctgcgggggtgcagcaaggaccccaacgagggcggggtgatctacagcctgatcgaggccctgtgggagaccgactgcaacctgatggagctgctgagcgaccggttcaccttcatggacaacctggaggagcggaccaagaagaacgagaagctcctgggggagttctcctaccaggacctggaggactcctacctgtccgcccccgtgaagcggatgacctggcagaccatcctgatcctgaaggagctgtacggggtgatgggcgagcccccgaagaagctgttcctggagatgccccgggagcacggcgagaaggggaagcggaccgtcagccgcaagaagaagctggaggccctgtacaagggctgcaaggaggacggccgcaactgggagcaggagatcaagggcctgaccgaggaccagctccgctcccggaagctgtacctgtactacacccagatggggaagtgcatgtacaccggccgccccatcgacctggagaccctcctgcgggagaactccaggtacgacatcgaccacatctacccccggcacttcatcaaggacgactccatcgagaacaacctggtgctggtggagaaggagtcgaacggccacaagaaggaccactaccccatcgaggccagcatccggcaggagcggatgggccactggaagttcctgaaggagaagggcctgatcaccgaggagaagtacaagcggctgacccgctcctgggagttcaccgaggaggagctggccgccttcatcaaccggcagatcgtggagaccggccaggccgccaagtacaccgcccagctgctgaagcggctgctgcccgagaccgagatcgtgtacgtgaaggccggcaacgtgtccgacttccggaacaagcgggacctgctgaagtcccgcgtggtgaacgacttccaccacgcccacgacgcctacctgaacatcgtcgtggggaacacctacgacaccaagttcaccaagagccccatccacttcatctggaactacaagcgggaccccgagaagtaccggtaccacatggaccggatgttcgacttcgacgtcatccgggacggggtgaccgcctggaaggccgggaaggacggcaccatcgtgaccgtggagaagatgatgaagaagaacaccccgctgctgaccaagcgggcctacgaggcccacggcggcatcgccgagcagaccatctactccgccaaggaggccaaggcggagagctacatccccgtgaagagcggggatgagcggctcggcgatgtgaccaagtacggcggcttcagctccgtggccggcgcctactacttcctggccgagcacggcaaggagggcaagcgcaagcggaccctggagcagatgcccatctacctgaaggagcgcctcgagcaggacgaggaggccctgaaggagtactgcatcaagaagctgggcctggtgaaccccgacatccggatcaagaagatccccttccggagcttcgtgaagcggaacgggtactacatgtacctgggcggcaagaccaacacccagatctggatcgagaacggggtgagcctgtgcctgagccgccagtgggtgaactacatcaagcggatggagaacttcaactccaacgagaaggaggaggacaaccgcgccgacaagaagaaggagatcaccaagcagcggaacgaggagctgtaccaggagctcctcaccaagcaccgggacaccatctacgccaagaagcccaacccggtgtacagcaagctgtccgccaagcagaacgacttcaaggagctgaccctgcgggagcaggtgcgggtcctgctggagctgctgaaggccacccagtgcgtcaacctgggcgtgaaggccgccgagatcggcctgaaggtcagccccctgaacatcgggaagggcatcggcaacgaggaggagttcctgctgatctaccagtccgtgaccgggatctacacccggaccatcgacctgaagaccgtgaaacgacccgccgccacaaaaaaggccgggcaggcaaagaaaaaaaaggattacaaagacgatgacgacaagtaa

SEQ ID NO: 274 - DNA, 4203 bp, synthetic construct
  source 1..4203: mol_type = other DNA
atggccccaaagaagaagcggaaggtcgacaagttctacctgggcctggacatcggcaccaacagcgtgggcatcgcctgcaccgacgagaactacaacctgctgcgggccaagggcaaggacctgtgggccgtgcggctgttcgacgaggcccagaccgccgccacccggcggaccttccgggtggcccggcggcgcctgcagcggcgggcctggcggatcgacatcctccaggagatcttcgagccccaggtggacgacaagctgttcttcaagcggctgaacaacagcggcttcgtgttcgaggacaaggacgcccagctgcagtccccctactccctgttcgccgacaaggccttcaccgacaaggacttctacaagaagtacaagaccatctaccacctgcggcgggccctggcccacggggacgggaagttcgacatccggctgtactacctggccatccaccacatcgtgaagtaccggggccacttcctgttcgacggcctgtccgtgggcgaggtccgggacgtgaagcggctgttcgaccgcctgaacgaggccagctcccaggtgttcggcgacgacgcccccgtgtggaacagcgaggtggccgacaagttccgggagatcgccctctgccgggacaaggccctcaacgacaagaagaaggcctgcttcgacctgttcgagtgcgccgacagcgtgcgcaagaaggccgccgtgaccctgatgctgggcggcaaggagaagcccaacaacgtgtacgcctccggcgagtacaaggaggagaagagcttctccttcggcgagctgaccgacgaggagtacgacgccaagcgggagatcttcggggacgacttcgagtacctggacgccctgcacggcatctacaactacctgatgttcgagcgggtgctgtccgggcacgacagcgtgtccgacagcatgatcgccctgtacgacaagcacaagtccgacctgcggaagctgaagaacctgatccgggacgggctgtcccacgacgagtacgtggccatgttcaagtccatcgacgagaagcacaactacgtgaactacatcgggtacaccaaccgcggcaagaagaaggtgaacgtgaagaagtgcaagcccgatgagttcttcgcctacgtgaagaagttcctgatcgagcggcgcgaggtgatcgccggcaagggcgagtactgcgtgaacgtgtgcaaggagatcctggtggagatcgacaacaagacgttcatgcccaagatcctgaacgccgacaacggcctgttcccctaccagatcaacaaggaggagctgtcccggatcctgaacaacctgtgccgggactacccccagttcgggatcgccgacagcgacggcaagtccgccgccgacaagatcatctccctgttcgagttcaagatcccctacttcgtggggcccctgaacacctaccacagccagttcgggggcaacagctgggccgtgcggaagcaggacggcaagatcctgccctggaacatcgaggagaagatcgactacgaggccagcgccgagaagttcatgcggcggatgaccggcaagtgctcctacctgcacggcgaggaggtgctgccccggtgcagcatctactaccaggccttcgacgtgctgaaccagctgaacaagctgaagttcaacaaccagcccatctccgtgcagcagaagcagaacatcttcaacgacctgtttctgcgggtgcggagggtgaccgacaagaccatcatcaactacctggtgaagtgcgggcagatccccgcctccgaggccgagcagaccatcctgtccggcaaggacggggacttcaaggccagcatgtccagctacatcaccctgtgccagatcctgggggagaacttcgtgaagaaccacctggacatctgcgaggacatcatcctgctgcacagcctgcacaccgacaagaagaccgtcgggcggatcatcgaggagcggtacgggaactacaacgagatcaagatcgccctgtccaggctgaaggggatcacctccttcaaggacttcgggcggctgagccggaagttcctgtgcgagctgtccgggggcaccctgcccaccggggcccccaggaccatcctggacgagctgtacgagaccaacaacaacctgaacgagctgctctacggggagcagtactgcttctccgagagcatcgcccaggagaacggggagatcgacgggaacatcacctacgagaccctggaggacatgtacatctccccgcaggtgcggcgcggggtgtggcaggccctgaagatgaccgacgagtgcgtgcgcaccgtgggccgcctgcccgacaagatcttcatcgaggtgacccggggcggcggcaacaagggcgagcgcaccgtcagccggcagaagaagctggccgccctgtacaacagcgcccggcaggccgagtacgacatcgccgagctgaccaaggagctgaaccggcagtccgacatggagctgcggaaggagcggctgtacctgtacttcctgcagctgggccggtgcgcctacagcgacgagcccatcagcctggaccagctgaacagcgacatgtacgacgtggaccacatcgtgccccgggccctgaccaaggacgactccatcgacaacaaggtgctggtgaagtccgagctgaaccggaagaagaaggacatctaccccgtgtgcgccgccctgcccagcgagttcgagcgggccaagcggctgtggaagaccctgaacagcgtgagctaccagaacgagaagctgatgtccgacaagaagtacgccgccctgacccgggtggcgcccctgaccgacgacgacctgcgggacttcatcaaccggcagatcgtcgtggccgggcagagcgtgaaggccgtggccgacctgctgaagcgcaagtacggcaccgaggtgaagatcgtctacagcaaggccagcaacgtggacgacttcaagcagcggttcggcatcatcaagtgccgggagaccaacgacctccaccacgcccgggacgcctacctgaacatcgtggtgggcaacgtgtacgacaccaagttctccagcgtggccacaatgcgctacgagaaggacggccggtccctggagtacaacttcgaccggctgtacaacaagccgatctccggcgcctggaacggggacgggtccatcagccacgtgaagagcgtggccgccaagcactccatgtgcgtgacccggtacagctacaccgggaagggcgagctgtacaacgccaccgtgtacggcaaggacaagggcctgatcgcccggaagcagtccgggccctactccgacaccgagaagtacggcgggtacaacagcctgaccaccgggtacttcgcggtgatccagtccaaggacaagaaggggaaccagatcaagacgatcgaggccatccccgtgctggtggccgagaccgagaagacccagaagggcgccttcatgcggtacctgaccgacgtcagggggctgaaggagcccaagatcatcctggacaagctgaagatcaagagcctgctgaagtacaacggcagctacctgtggatcgccggcaagtccaacaaccggatcatctacaacaacgccatgcagtggtacgccgacgacaagatcgacgcctacgtgaaggccctgaccaagctgtgctcctacaaggccaagaacatgctgtccgaggacgagctgaagcgggccgagtactacatcaacaccaaccggaagggcgacaagaagtccgtggtgaacgccgacgagaacctgcagctgtacgacgccgtgaccgagcagctggccaagcccttctacggcggggcctccggcttcacctgcgtgcggaagaagatgatcgccaagcgggccgagttccagaagctgtccgtgctggagcaggcccagaccctgctgggctgcatccacgtgctccagtgcaacggcagcgacgccgacctgagcaagatcggcgagagctcccacgccggcaagctggtgatcaacaacgacatcacggacgccgaggtgttcgtgatcaacctgagcgagtgcggcttcaccgagaagcggcagaagctcaaacgacccgccgccacaaaaaaggccgggcaggcaaagaaaaaaaaggattacaaagacgatgacgacaagtaa

SEQ ID NO: 275 - DNA, 4113 bp, synthetic construct
  source 1..4113: mol_type = other DNA
atggccccaaagaagaagcggaaggtcgagaagttctacctggggatggacatcgggaccaactccgtgggcatcgcctgcaccgacgagaagtaccggctgctgcgggccaaggggaaggactgctgggccgtgcggctgttcgacgagagcaagaccgccgagacccggcggatgttccgcggggcccggcggcggctggagcgccgcaagcagcggctgggcttcctgcaggccctgttcgcccccttcatcgacgacgagaccttcttcatccggctgaacaacagccagtactaccccgaggacaagagcgagctcctggggaagaacaagaacaacctgttcgccgacaagaactacaccgacaaggactaccacaaggacttccccacggtgtaccacctgcggcacaagctgcagaccgagcggatgagcgacctgcggctgtactacatcgccctgcaccacatcctgaagtaccgcgggcacttcctgttcgagggcgggatgaacgacgtgcgggacgtggggcggctgttcaccgagctgaacgaggtgtgcgccgacctgtacagcgacgccgagaacatcccctacttcgacccctcctacacccaggaggccaaggagtgcctgatgcgctccgacatgggcatccgggacaagcagccccacctggagtccctgttcggcaaggacgccatcatccgcgagatcatcaaggggatctgcggggcctccatctcccccaagaccctgctgggggactcctacaaggaggagaaggccttctccttcaagaagatcaccgacgagaccttcgacgccatgcagtccacctacggggacgacttcgccctgctggagaagatgcgggccatctacagctacatcgtgttcgagaagctgctggagggccaccccaacgtctccagcgcgatgatcaagctgtacgaggaccacaagcgggacctgtgccagctgaaggagttcctgcggaagaacgcccccgacgaggtgtacaagagcttcttcaagagcgacaaggagatcgccaactacgtgaactacgtggggtacaccaagcggggcgggaagaaggtcaaggtgaagctgtgcgacgacgagagcttcttcaccgccctgaagaagatgctgctgcagctggacggggtgaaggacacctccatcctggacggcatcatccagaagatcgacaacgggaccttcctgcccaagatcctgcacagcgacaacggcctgttcccccaccaggtgaacgaggacgagctggtgaagatcatcagcaacatggtggacgcccacccccagaccaaggagatggccgacaagatcctgcccctcttcctgttcaagatcccctactacgtggggcccctgaccgggaagaactcctgggccgtgcggtccagcgagaagatcaccccctggaacttcgacgaggtggtggacaaggcccagtccaacgagcggttcatgcggcgcatgaccaacaagtgcacctacctgcactgcgaggacgtgctgccccaggccagcatcctgtaccagaagtacaacgtgctgaaccagatcaacaagctgaagatcgatgacgtgcccatccccgccttcctgaagcagcagctgttcgaggagctgttcctgcggaagaagagcgtgaccgacaaggccatcatcaacttcctggtgcggaacggccagctggacgactgccgcaagaacatcgccaagatcaccgggaaggacggggacatcaaggccagcatgtcctcgtacatccgcctgaaggagatcctgggcgacttcgtggacgaggacctggccaagggcggggagatctgcgagaacatcatcctgtggcacaccctgaacaccgacaagaacatcgtgtgcgacctgatcctgaagaactacggggacatctccgtgatcaaggatcacatcaagcagctgaaggggctggtgttccagaagttcggccgcttcagcaagaagttcctgaccggcatcgacgccgcccagagcaactccggggcccggatctccatcctggacatcctgtacgagaccaaccagaacctgaacgagatcctgttcaacgagaagtacaacttcgaggaggccatcgccaaggagaacggcaccacctcctccgacatcacctacgaggacgtggagaacctctacgtgtcccccgccgcccggcgggggatctggcagtccctgcagatgtccgaggagtacgtccgggccatcgggaagatccccgacaagatcttcatcgagtgcacccgggaggacggccagaagggcgacaagggccggaagtcctcccggaagacccggctgctggactgctacaagtccatcaagaagtacaaggagtacgaggacatcttcaacgagctggacaactccggcatcaccgacatgcggctccggcaggagcggctgtacctgtacttccggcagctgggccggtgcatgtacaccggcgagcgcatcgacctggaggacctggccaccaaccggtacgacgtggaccacatcctcccccggtgctacatcaaggacgactccctggacaacaaggtgctggtcctgcgctccaagaacgccgagaagcgggaccggtaccccctgccccacgggttctccaaccagcaggtgttctggaagctgctgctggacaaggacctgatcaaggacgtgacctacaagcgcctgacccgggtggagcccctgtccgaggacgactacaacgacttcatcaaccggcagaaggtgatcaccgaccagacggtgaaggccgtggccgagctgctgaagcggaagtaccccgagtccaagatcgtgtacagcaaggccaagaacgtgtccgacttccggcagaagttcgacatctacaagtgccggaacaccaacgacctgcaccacgcccgggacgcctacctgaacgtggtggtggggaacgtcttcgacacctgcttctccacccccatgagcctgttctacaacaagaacgacgagtggcggacctacaacctgaagacgatgttcacccggaacgtcgccggcgcctgggacgacaacagcatcagcaccgtgaagaccatctgcgccaagaactccatggccgtgacccggtacgcctaccgggagaagggcgagttctacaaccagacggtctacgcccgggacgacaagggcatcaccctgccccggaaggggaagggggtgctggctgacgcccggcgctacggcggctacaagggccagagcaccgcctacttcgccatcatccagagcaaggacaagcgggggaaggtgatccgcaccatcgaggccgtgcccgtgctgctgcacgagcagtccaagaacgacttcaagatcctgaagcagtacttcgagaacagcgggctgcgggaggtggagatcctggtgcccgaggtgaagaacaagcagctgatctcctacaacggcatgcccctgtacatgacaggggtgtccgggagcaacatcctgtgctggaacggggtgcagttcttcagcgactccaagatcgacgagtacgtgaaggccctggccgagttctacgagcgctacggccgggagctggactccaagaccgacgagttctacatcatcaagaccaaccggatgggggaggtcaagctgaagatcgaccggcggcagaacgagagcctgtacaacatgctctccagcaagctggagggcaagatctactccgggatgaactactgcgccaccttccggaagatcctgacggacggggcggagaagttcaacaagctgaccgtggccaaccaggtcaaggtgctgctgcagatcctgaacttcttcgagtgcaacgccctgcgctccgacctgtccctgatcgggggcggggccatcgtcggcaccctgaagttcaacaagaacatcaccgacgtggacttccgcctgatctaccagagcccctgcgggctgaccaagcgggagcggaagatcaaacgacccgccgccacaaaaaaggccgggcaggcaaagaaaaaaaaggattacaaagacgatgacgacaagtaa

SEQ ID NO: 276 - DNA, 4149 bp, synthetic construct
  source 1..4149: mol_type = other DNA
atggccccaaagaagaagcggaaggtcatcaagtactacgtcggcatcgacatcggcaccgactccgtggggatcgtgtgcaccgacgaggagtaccggctgctgcgggccaagggcaaggtgctgtgggccgtgcggctgttcgacgaggccaagaccgccaaggagcggcgcaaccagcgcaccgcccggcggcgcctgcagcggcgcgcccagcgcatcgacctgctgcaggagctgttctacccccacatcagcgacaagctgttcttcgcccggctgaacaacagcggcttcctgtacgaggacaaggacgagaagctgcagagcccctactccctgttcgccgacgagaactacacggacaaggagttctacaaggagttccccaccgtgttccacctccggcgggccctgatcgccggggagaagaagtacgacctgcggctgtactacctggccatccaccacatcatcaagtaccgggggcacttcctgttcgaggggcaggagatgtccgagatccgggacatcaagcggctgttcgacaacctgaacgagaccgccgacaacaccttcgacgagggcgcccccatcttcctggccgagaaggccgaggagttcaagaagaccgccatgagccggatgggggtgaacgacaaggtgaaggagtgctgcgccctgttcggcgtggggaaggacgagcgcaagaaggagatcatcaagctgctgagcggcggcaccggcaagacctgcgtgatcttcgacaacgaggagtaccgggacgagaagatctgcttcaagggcctcgacagcgagaccttcgaggccaagcagaccgtgttcggggacgacttcgactacctgtccaagatcaagtccatctacgactacatcgtgttcgagcacatcctgcaggggaacgcctacatcagcgacagcatgaccaagctgtacgacaagcacaagtccgacctgcggaagctgaaggacttcatcgtgaagaactgctcccacggggactacatcaagatcttcaagtccaccgaggagaagtccaactacgtgaactacatcgggtacacgaagaagggcaagtccaaggtgaacgtgaagaagtgcaagtacgacgccttcaagaagtacctgcagaacttcctggacaagaccccgctgagcgaggagcaggagtccgtgaagaaggacatcatcgaggagctgaagaacgacaccttcctgcccaagatcctgaacgccgacaacggcctgttcccctaccagatcaacctgtccgagctggacaagatctccgagaacctgtgccgggactaccccgagttcgggatcaagaccgacgggaacagcatcgccgacaagatccggagcatccacaccttccggatcccctactacgtggggccgctgaacaccagcgccggcatcaacgcctgggccgtgcggaagaaggacggccggatcaccccctggaacttcaaggacatgatcgacgaggccgagtccaacgagaagttcatgcggcggatgaccaacaagtgcacctacctgtacggggaggacatcctccccaagtgcagcatcctgtaccagaagttctgcgtgctgaacgagctgaacaacctgcgcatcaacgagcagaagctcagcgtgcagctgaagcaggacatcttcaacgacctgttcctgaaggacaagcggatcacctacaagaagatccgcgagtacctcgtgaacaaggggtacttcgccaagaacgaggagaccgggatcaacctgtccggcacggacgggggcttcaagagctccatgagctcctacatcgccctgaagtccatcctggggaacttcgtggactcccactccgacgtgtgcgagcagatcatcctgtggcacaccctgaacaccaacaaggacatcgtggccgagctgatcagcaagaacttcggctcctacaaggaggtggcctccaacatcaaggccctgaagggcctgtccttcaaggacttcgggaagctcagcaagcgcttcctgtgcgacatcaagggcggggtggacgaggagaccggcgccgtgtacaacatgatcgagacgctgtacaacaccgacaagaacctgaaccagatcctgtactacgacaagtacaccttcctgcagcggatcgaggaggagaacggcgacgccgacgacgaggtgacctccaagaccctgaccgacatgggcctgcccccgcaggtgaagcggggcgtgtggcaggccctgcagatggtcgacgagtacgtgaaggccctggggtgcccgcccgccaagatcttcgtggaggtgacccggggcgacgagtcccggggcaagaagaagggcgtgcggagcgtgccccggaaggcccagctgcagaacctctacaaggaggtgaaggacatcgacgagctcaagaaggagctcaaccgggaggaggtgaccgacagcaagctccgggaggagcggctgtacctctacttccggcagctgggcaagtgcgcctacagcggcgagcggatccggctggaggatctgggcagcaaccagtacgacgtggaccacatcctgccccagtccctgaccaaggacgacagcctggacaacaaggtgctggtgctgcgggcctgcaacgcccggaagagcgacaccttccccgtgcccgccgagtaccaggccaagatgcggaaggactggaagctgtggaaggagaaggggctgatctccgacaagaagtacagcctgctgacccggaccgagcccctgaacgacaacgactaccgggacttcatcaaccggcagatcgtgaccaccggccagatgtccaaggccgtggccgagctgctgaagcgcaagtacggggaggagaccaagatcgtgtacagcaagggcatcaacgtggccgacttcaagaacaagtacggcatcgtgaagtgccgggagaccaacgacctccaccacgcccgggacgcctacctgaacgtggtggtggggaacgtgtacgacacccggttctccggggtccaccgcatgttcgccaagcgcgaggacgactcctggcgccagtacaacctgaagaagctgttcgatcggcccgtgggcggcgcctggaaccccgacagcagcatcgagacggtgaagaacaccatccggcagagcgggatcagcgtgacccgctacgccttcacggagaacggcgccttctacgatgccaccgtgtacgagtgcggggacaccggcatcgacgccccgcgcaaggagaacctgcccaccgagaagtacggcgggttcaagagcctgagcaccgcctacttcgccatcgtgcggagcgtggacaagaagggcaagtccatcaagaccatcgagcgggtccccgtgctcaccgtgtacaagcagaagaccgacaaggacgccttcatcaactacctgaccaaccgggtggggctgaaggagccccagatcctggtggagaaggtgaagatcaagtccctgatggaggtgaacgggacccccgtgtggatcgccggggtgtccaagaaggacatcctgatccacaacgccgtgcagtggtacacggacgccgagaccgacaagtacgtgaaggggctggtgaagctggaggacatgaagaagtccggcaagctgtccgacaaggagctggaggagaaggagttcgtgctccacaccaaccggttcaacgagaacaagctggtggtggagcccaagctcaacatcgacctgtacaaccggatcatcagccagctggagaagcccatctacggcggcatcagcgccttcgccaccttccgcgagaacctgcggaagggctccgagaagttcaaggagctgcggtgcttcgaccaggcgtacgtgctgctgcagtgcatcaagttcctgaagtgcaacgccgagatcgccgacctgagcctgatcggcgccggcgagaagtccggcaagctgaccatcaacaagaacatcaccggcaaggacatcgtgatcgtgcacaccagcccctgcgggctgatcgagcgccgcaagaaggtgaaacgacccgccgccacaaaaaaggccgggcaggcaaagaaaaaaaaggattacaaagacgatgacgacaagtaa

SEQ ID NO: 277 - DNA, 4164 bp, synthetic construct
  source 1..4164: mol_type = other DNA
atggccccaaagaagaagcggaaggtcggcaacacccggggcaaggacaagtactacctggggctggacatcggcaccaccagcgtgggctgggccgtgaccgatgaccggtacgagatcatcaagcgccacgggaaggccctgtggggcatccgcctgttcgagcaggccaacaccgccgaggagcggcgggccttccggaccgcccgccggcggaccgagcggcggaagaaccggatctccctgctgcagcagctgttcagcgaggagatcgccgccaaggaccccggcttcttcgtgcggatgaaggagtccaagtacatccccgaggacaagcgggacctggagggcaagcggcccgagctgccctacaccctgttcgccgaccaggagttcaccgacgtggagttccacaagcagttccccaccatctaccacctgcggtacaccctgatcacccagatggacgagaagccggacatccggctgctgtacctggccctgcaccacatcctgaagcaccggggccacttcctcttcgaggggaaggagatcagcgaggggatgaacttcctggccgccgtggaggtgttcctggactgcctggaggagaacgggatcgagctgtccgagttccagcaggaggacaagatccgcaagctggaggagatcctgacctcctccgacagcagccggaccgagaagaagaagcagctgtgcggcctgttcgccggcgaggacaagcagaagatggccctggtgggcctgatcgccggctgcaaggtgaagctgtccgtgctgttcgacgaccgggccctggacgaggaggagcgcagcgagatctccttctcggacgacaactacgaggagtacatctcccaggtggaggaggtcctgggcgaccggttcctgctgatcctgtccgccaaggccatcttcgactggagcatcctgtccgacatcctgggcacctgctcctacctgagcgaggccaagatccagtccttcgagaagcacaagcaggacctgatcaagctgaagaacctgctgcggaaggaccgggcctgctaccggaaggtgttcggggagcccggcaagaccgccaactacagcgcctacgtgggcatggtgaagaagaacggcaagaagcagcccatcaacaagaactgctcccgggaggacttctacaacttcctgaagaagaccctgcaggacatcccctgcgccgagaccgaccggaaggtgcgggacgagatgctggaggagatcgagaaggggaccctgttccccaagcagatcctgcgggacaacgccgtgatcccctaccagctccacgagaaggagctgaacaagatcctggagaacgccgtgcggttctaccccttcctggagaagatcgacgaggacgggtactccgtgtcccagaagatcaaggagatcttccggttccggatcccgtacttcgtgggccccatcaacacctaccacaaggagaagggcgggaactcctgggcggtgcggatcgggaacaacaccgacaagatctacccgtggaacttctccaagaagatcgacgaggagcagtccgccgagcggttcatcaagcgcatgaccaacaagtgcacctacctgctcggcgaggacgtgctgcccaaggagtccctgctgtacgccaagttcaacgtgctgaacgagctgaacaacctgcggatcgacggcgagctggtgtccgtggagatgaagaagaagatctaccacgacgtgttcaagcggcacaagcgggtgaccggcaagcgggtgaaggactacctcatccgcgagggcctgatcaccaaggagcaggagctgtccggcttcgaccagaacttcaagtccagcctgaaggcctacatggacatgaagcagatcaccaccggcatcagcctgaccgagcagcagcaggaggacatcatcctggacatcaccctgttcgccgacagccccaagatgctgaagcggcggatcaagcagaagtacccccagctcagcgacaagcaggtgacccagctgagcgagaagaagtacagcggctggggccggctgagccgggccttcctggaggaggtggaggccgtgaaccccgagaccggggtggccatgaacctgatcaccgccctctgggagaccaacgacaacctgatgcggctgctgagcaagaagtacagctacgccgaggagatcgagaagcggaacgcctggggcgactccgagtccgagatctcctaccagaccgtgcaggacctgtacgtgtcccccgccgtgcggcggcccatctggcaggccctcaagatcgtgaaggagatcgagcacatcatgggggccgcccccgagcggatcttcgtggagatggcccgcgagcccggcaagaagggcgagcggaagatctcccggaagagccgcctgcaggagctgtaccgcttctgcaagaaggaggccagcgagctgtacgactcgctcagccagaaggacgagaacgagctgcggtccaacaagctgtacctgtactacacccagatggggcggtgcatgtacagcaacgaggtgatcgacctcgaggagctgttcaccaaccggtacgacatcgaccacatctaccccgcctccaaggtgatggacgactccctggacaaccgcgtgctcgtgaagtccgagcggaaccgctccaagtccgacaccttccccgtgcccgagtcctacgtgaagcaggccggggacctgtggcggaccctgtccgagaagggcctgatctccaaggagaagtaccaccggctgacccgccgggacagcttctccaccgacgagctggccggcttcatcgcccgccagctggtggagacccggcagtccaccaaggccgtgacccagatcctgaacaaggcctaccccaagaccgagatcgtgtacgccaaggccaaggccgtgagcgacttccggcagcagttcgacctgatcaaggtgcgggacctgaacgaccaccaccacgccaaggacgcctacctgaacatcgtggtggggaacacctactacgtgaagttcaccaaggacgccagctggttcgtgaagaacaaccccgggcggacctacaacctgaagaagatgttcgagaacgacgtcaagcgcggggacgagatcgcctggaccagcggcgggaaggggaccatccacaccgtgaagaagtggatgcggaagaacaacatcctgttcacccggaaggcctacgaggtcaagggcggcctgttcgaccagcagctggtcaagaaggggaagggccaggtgcccgtgaagggcaaggccgaggacacccggctggcctccatcgagaagtacgggggctacaacaaggcctccggcgcctacttcatcctggtgcagtccgacgacaagaaggggaaccccatgatctccttcaagttcgtgcccgtgtacctggcccagaagctggaggagagccaggagaacatgctccagtactgccgggaggagctcggcctgatcaacccccgggtgctgctgcccaagatcaagatgggcgccctgatcgaggtggacggcttccggatgcacctcagcgggcgcaccaacaaccgcctgctgttcaagggcgccaaccagttcgtggtgagcgagcgcatccagaagaccatcaagaaggtgggcaaggtgtgcgccgaccacgccatcaacaagaacgtggccgtgagcgaccgcatgggcctgaacgaggaggacctgaagcgggtgtacgacaccttccacgacaagctgaagaacagcatctacggcaaccagctgtccgcccagatcgacaccctggagaacggggaggacaagttcgtgcgcctgtccaaggtggagcagtgcctggtgctgaacgagctgctccacctgttccagtgccggtccgtgctgtccgacctgaccctgatcggcggccccaagcgggccggcaccatcctgctgaacagcaacatcagcaagctggagcacatcttcctgatcaaccagtcgatcaccggcttctacgagcaggtgatcgacctgaaggccctgaaacgacccgccgccacaaaaaaggccgggcaggcaaagaaaaaaaaggattacaaagacgatgacgacaagtaa

SEQ ID NO: 278 - DNA, 4170 bp, synthetic construct
  source 1..4170: mol_type = other DNA
atggccccaaagaagaagcggaaggtcgagaagttctacctgggcctggacgtgggcaccgacagcgtgggcatcgcctgcaccaacgaggactacgagctgctgcgggccaaggggaaggacctgtgggccgtgcggctgttcgaggaggccaagaccgccgccgagcggcggtccaagcggaccgcccggcggcggctgcagcgccgggcctggcgggtggacctcctccaggagctgttcgagccctacatgtccgactccctgttcttcccccggctgaacaactccggcttcgtgtacgaggacaaggacgcccggctggggtccccctacagcctgttcgccgacaagaactacaccgacaagaccttctacaaggagttccccaccatctaccacctgcggaaggccctggtgtacggcgacaagaagtacgacctgcggctgtactacctcgccgtgcaccacatcgtgaagtaccgcgggcacttcctgttcgaggggcagtccatgtccgacatccacgacttccgggtcctgctggacaagctgaaccaggccgccgaggagagcttcttcgagaacacccccatcatctccgccgagaagagcgacgagctgaaggagatcgccctgaacaagagcctgcggctgaacgacaagaagaagaagtgccgcagcctgctgaacgccatgaagagccccctgaaggacatcgtgaccctgatgctgggcggctccgccaagccctgcgacatcttcgacaacgacgagtacaagcagctgaagagcatctccttcaaggggatgaccgaggacgagttctccgcctacgaggacaccttcggggacgacttcgcctacctgcaggccctgaagaagatctacgactacatcgtgttcgagcagaccctggacggcaacgactacatctccgaggccatgatcaagatctacgacaagcacgccagcgacctgcggcggctgaagaagttcctggcggagaactgtcctcacgagacctacctgaaggtcttcaagagcgtgagcgagaagaacaactacgccgcctacatcgggtacacgaaggtgggcaagaagaaggtgaagctgaagaagtgcaccgacaaggccgagttcgacaagttcctgaagaagatcgtgagcgaggtgaaggtgtccgacggggacaccgagaaggagaagctcctctccgagatcgagaacggggacttcctgcccaagatcctgaacgccgacaacggcaccgtcccctaccagatcaacggggtggagctgaaccgcatcctggagaacctgtgccgggactaccccgacttcgcctccgccgtggacggcgggctctccatcgccaacaagatcaagagcatcttcgagttcaggatcccctactacgtggggcccctgaacacctaccacagcaaggacggggacaaggggaactcctgggccatccggcggagcgaggggcggatcctgccctggaacttcgacgagaagatcgacagggccaagtccaacgagagcttcatgcggcggatgaccaacaagtgcacctacctgtactgcgagaacaccctgcccaagtgcagcatcctgtaccagaagttcaacacgctgaaccagctgaacaacctgaagatcgacgagcagcccatcagcgtggagctgaagcaggccatctacaacgacctgttcctgaaggacaagcgggtcaccaagaaccggatccgcaagtacatcgtggaccggggctgggcccccagctcccgggagagcgagatctccctcagcgggttcgacggggagatcaacgtcagcatgtccagctacatcatgctgaagaacatcctgggggacttcgtggacgagaacaccgacatctgcgaggacatcatcctgtggcacaccctgaacaccgacaaggggatcgtggagaacctgatcaagtccgagtacgggcacatcggcaagatcgccgagaacctgaagcgcctgaaggggatcacctccttcaaggacttcgggaagctgtccaagaagttcctcagcgagatcaagggggcctaccgggagaccggggaggtggccaccgtgatctccatgctgtacgagaccaacctgaacctgaaccgcatcctgtgggacaagcggttcacgttcatggaggccatcgacgccgagaacaacgtgtcctccgaggacatcgcctacggcgccctggaggacatgggcctgaacccccaggtgcggcggggcgtgtggcaggccctgaagatgaccgacgagtgcatcagcgccgtcgaccgggcccccgacaagatcttcgtggaggtgacccgggggtgcggcgagaagggcaagcggaccgagagccgcaagatgaagatcgagaagctgtacgagaccgcccacgacgtggacgagctgctctccgagctgaagacccgctccgagagcgacctgcggcaggagcggctgtacctgtacttcctgcagctggggaagtgcgcctacagcggccgccagatcagcctggacgacctgaacggcaacacctacgacgtggaccacatcgtgccccagagcctggccaaggacgacagcatcgacaacaaggtgctggtgtaccgggagtgcaacgccaagaagaccaacatctaccccgtgcccgagcagttccggagcatgcggaagatgtgggaccggctgaaggcccaggggctgatgtccgccaagaagtacagcctgctgacccggaccgagcccctggccgagtccgactacaacgacttcatcagccggcagctggtggtgaccggccagacggccaaggccgtggccgagctgctgaagcggaagtacgagaacagcggcaccaagatcgtgtactccaagggcagcaacgtgtccgacttcaagagcaagtacgacatcgtgaagtgccgggagaccaacgatctgcaccacgcccgcgacgcctacctgaacatcgtggtgggcaacgtgttcgacacccggtactccgaggcctggttcaagtcccgcgacacctacgacaagtggcggaactacgaccgcaccaagatcttcgaccgggagatcgacggggcctggcacggccaggacaccctggtgaaggtcaaggccaccgtggggaagtgcagcatcggggtgacccggtacgccttcaccggcaaggggaagttctacgacgagaccgtctacgggaaggacgggggcgcccagctgccccggaaggaggggaaggccgggtccccctccccctacgccgacgtggagaagtacgggggcttcaagtcccccttcaccgcctacttcgtggtggtgaagagcgtggacaagaaggggaaccccatcaagaccctggaggccatccccgtgatcgtggactacaagtccaagaacgacagccacgccgtgatgaactacctgtgcaacgtgcggcggctgaaggaccccaccgtgctggtggagaagatcaagacccacaccctgctggagatcaacggcacccccgcctggatcgccggcatcaccgggtcccagatcctgctgcacaacgccgtgcagtggtacacctcctccgagaccgaccgctacgtgaaggccctcgccaagctggacgaggccgacaagagcaagcggatctccgacgaggagcggaaccgggccgagttcgagatgagcaccaaccgcttcaaggaggtgaagtgcgccgtgaacgccatcaacaacctgaagctgtacgacgagatcatcgagcggctcggccgcaagatctacgggggcctcagctccgtgcggaccttccgggggaacctctccaagagccgcgagaagttcgtggctctgagcgtgatcgaccaggccaaggtgctgctgcagtgcgtgaagttcatgaagtgcaacgccgaggccgccgacctgagcctggtgggctgcggcaagcgctgcggcatcctgctgatcaaccagaacatcaccgacatgaacatcaccgtggtgcacaccagcgagtgcggcctgaccgagcgccggatcaagatcaaacgacccgccgccacaaaaaaggccgggcaggcaaagaaaaaaaaggattacaaagacgatgacgacaagtaa

SEQ ID NO: 279 - DNA, 4212 bp, synthetic construct
  source 1..4212: mol_type = other DNA
atggccccaaagaagaagcggaaggtcatcgacaacctgtgcatcatggtggagatcgcccagatcaagtggtacaacatggtgaagtgcaacgtgatccagtggggcaaggtgatccagatgaagaaggactactacctgggcctggacctgggcaccggctccctgggctgggccgtgaccgacgcccagtacgagatcctccggaagcacgggaacgccctgtggggcgtgcggctgttcgacaacgcgaacaccgccgaggagcggcggctgttccggaccgcccggcggcggctggaccgccgcaaccagcggatcaagctgctgcaggagatcttcgccgaggagatcaacaaggtggacgaggggttctacctgcggatgaaggagagccgctacgtccccgccgacaagctggacgtgaagaagaagtgccccgagctgccgtacgccctgttcgtcgacatcgactacaccgacatcgactaccacaagcagttccccaccatctaccacctgcggcggtggctgatgaccaccgaggagacccccgacgtgcggctggtgtacctggccctgcaccacctgatgaagcaccgggggcacttcctcttcaccgggaacatcgagaacatcaaggagttcaacggcaccttccggcagttcatcaaggggctgcaggacgaggagctggacttcgccctggacatcaccgacgacaagaccgtcgacgtggagtccatcctgaaggacagccggctgaccaagaccaccaagaaggccaagctgatcaagctgctgggcgcccagaccgcctgcgagaaggccgccctgggcctgatctgcggcgggaaggtgtccctgcgggacatcttcggcaacaaggagctggacaactgcgagcgccccaagatcagcttcagcgaggccggctacgaggagtacgccaacgtggtggaggccgatctgggcgagcagttcgtgatcatcgagcgggccaaggccgtgtacgactggaccatcctggccgacaccctgaagtcctacacctccatcagcgaggccaaggcggcctcgtacgagaagcacaagaacgacctgatctacctgaagaagctggtgaaggagaacctgggcaaggactcctaccggaccatcttcgtgaagaccaacgagaagctgaccaactacagcgcctacatcggcatgaccaaggtgaacggcaagaagtgcgagatggtgggcaagcagtgctcccgggaggacttctacgccttcctgcggaaggaggtgatgaacaagatcgccgacgagaagaagaccgagtacctgcggtccgagatggagaagggcaccttcctgcccaagcaggtgaccaaggacaacggggtcatcccctaccaggtgcacctgtacgagctgcgggagatcatcaacaacctgaaggagcgggtgcccgtgctgaaggagaacgaggagaagatcgagctcctgttcaccttccgggtgccctactacgtggggcccctgaacgggatcaagaagggggaggacaccaccaactgggtgatcaagcggaagcaggagcggatcttcccctggaacttcgaggaggtggtggacgaggaggcctccgccgagcggttcatccgccggatgaccaacaagtgcacctacctgatgcacgaggacgtgctgcccaagaacagcatgctgtactgcaagttcatggtgctgaacgagctgaacaacctgcggatcgacgccgagcccatcagcgtggccctgaagcagcagatctacgagcggctgttccagcggtaccggaaggtgacccagaagaagctgaaggcctacctgctgcaggagggcctgatcgaccggaacgccgtgatcaccgggatcgacggcgacttcaagtcctccctgcgggcctaccacgacttcaaggagaagctgaccgggtgcgccctgagccaggacgagaaggagaacatcatcctgaacatcaccctgttcggggaggacaagaagctgctgtccaagcgcctggccaagatgtaccccaacctgtccatggcccagcgcaagggcctgtgcaccctgtcctacaccgggtggggccggctgtccaaggagttcctggagagcatcaccgccgtgtcccccgagaccggggagaacatgagcatcatccagttcctgtgggagaccaacgagaacctgatgcagctgctgagcgagaagtacgacttcgccaagaagatcgaggccgagaacgtgaacgaggagatccggaacttcagctacaacctgctggagcagctgcgggtgagccccgccgtgaagcggcagatctggcagaccctgcagatcatcaaggagctgaacaaggtgatggagcagcccccgaagaagatcttcgtggagatggcccgggagaaggccgagtccaagcggatggagtcccgcaagtccaagctgctggacctgtacaaggcctgcaagaacgaggagcggaactggatcgacgccctcgggaacaccgaggagcaccagctccgctccgacaagctgtacctgtactacagccagaagggccggtgcatgtacagcggcgagatcatccgcctggaggacctgtgggacaacaaccagtacgacatcgaccacatctacccgcagtccaaggtgatggacgacagcctggacaaccgggtgctggtcaagaagacctacaacgccgagaagaccgacgtgtaccccatcgccgccgacgtgcggaagaagatgcagtccttctggaaggccctgtgggagggcgggttcatctccaaggagaagtacgagcggctgtcccggtgcaccgagttcgaggccagcgagctggccgggttcatcgcccggcagctggtggagacccgccagtccaccaaggccgtggccagcatcctgaagcaggtcttccccgagaccgaggtggtctacgtgaaggccaagatcgtgtcccagttccggcaggacttcggcatgatcaaggtgcgggagatgaacgacttccaccacgccaaggacgcctacctgaacatcgtggccgggaacgtgtaccacaccaagttcaacgggaacgccacctggtacatcaaggagcaccccggccggtcctacaacctgaagaagatgttcaccagcgacaaggacatcggccggggcggcgagatcgcctggaaggccggcgagaacggcaccatccggaccatccggaagtacgtggacaagaacaacatcctggtcacccgccggtcctacgagatgggcggcgggttcttcgaccagcagctgatgaagaagggcctggggcagatccccatcaagtcctccaacgagcggctgtgcaacatcaagaagtacggcggctacaacaaggccgccggcacctacttcatgctgatcgagtccgaggacaagaaggggaacaagatccggaccctggagtacgtgcccctgtactgcaagaagcagatcgagcagagcgagcgggacgccctctgctacttcgccgaggaccgggggctgaagaacccccggatgatcctgaacaagatcaagatcgacaccctgttcaaggtggacggcttctacatgtggctgtccggccggaccggcaaccagctgctgttcaagggcgccgtgcagctgctgctgaccagctgcgacgagcggaccctgaagaaggtgatcaagttcgtgcagcggaagaaggagaacaagaacaccgtgatcgtggagcaggacatgatcttcgaggaggacgtcctgcacctctacgacaccttcctgagcaagctgggcggcaccgtgtaccacagccgcctcagcgcccaggagaagacgctgcgcgagaagcgggacgccttcaacgagctgtgcaaggaggaccagtgcatcgtgctgtacgagatcctgcacatgttccagtgccagtccggggccgccgatctgtccatgatcggcggccccaagaaggccggcatcctggtgctgaacagcaacatcaccgggtgcaagcagatctccatcgtgaaccagagccccaccggcatctaccagcaggagatcgacctgaagaccgtgaaacgacccgccgccacaaaaaaggccgggcaggcaaagaaaaaaaaggattacaaagacgatgacgacaagtaa

SEQ ID NO: 280 - DNA, 3447 bp, synthetic construct
  source 1..3447: mol_type = other DNA
atggcccccaagaagaagaggaaggtgatggagaagaccttccagaacaaggagcggcaggtgaagatgggcgtgcggttcggcctggacatcggggtggcctccgtgggctgggccgtggtgaacgacaactacgaggtggaggaggccggggccaacctgttcacctccgccgacgccaaccagaacgtggagcgccgctccttccggcagatcaagcgcctgcaccggcggcgccggaaccgcatctccgacttcaagaagctgtggcactccatgggcctggagatcccggccaccaacatcaacaacgtgctggggctgcgggtgaagggcctgaacaaccgcctgagcgaggaggagatcttctacgtgctgcggaacgagctgctgcaccgggggatctcctacctcgacgacgccatcgacagctccaccagcctgcagtccgactacgccaaggggatctccgagaaccagaaggagctggactccggctccttcccctgcgagatccaggtgaagcgcctggagaagcacgggcggtaccacggcaacatctccatcgggcaggacgacgagaaggtgatcctgtccaacgtgttcaccacgagcgcgtacaagaaggagatcctggccatcctggagcagcagaagaagttccacaagttcctgaccgactccttctgcgagaagtacatcgagatcttcctgcggaagcggaagtactacaccggccccggcaacgccaagagccggaccgactacggcaagtacaccaccaagatcaacaaggagaccggggagtacatcaccgagaagaacatcttcgagaagctgatcgggaagtgctccgtgtacaagaacctggagcgggccgccggggccacctacaccgcccaggagttcaacctgctgaacgacctgaacaacatcagcgtcaacggccggaagctgtccaaggaggagaaggaggccgtgatcaacgagaccaagacctccaactccttcaacatcaggaagatcctgaagaaggccaccggcgaggacatcgagaccctcaccggggcccggctggacaagaacgagaaggaggacttccacaagttcgcccagtacaacctgatgcggaaggagttcgagaagaacggcttcgacatcaccgccctgtcccgggagaacctggacaagatcgggcgggtgctgaccctgaacaccgagaaggaggccatcctgaacgggttcaagctggagggcctgagcctgcccgaggagatggccgactgcctggtgtgcctgcggaagcagaagggcagcttcttctccaagtggcagagcttcagcctggagatcatgctgaagctgatccccgggctgtacgagcagcccaagaaccagatggagctgctgtccgacatgggggtcttcaagacctccaaggacatcttcaagaactgcaacaacatccccgcctctgccatcctggagaacatctacaaccccgtggtgagccgctccatccgggtgaccgtgcaggtggtgaacgccctgctgaagaagtacggctacccggagcagatcatcgtggagatgccccgcgacaagaacgaggaggacatgaagaagcggatcgccgacgggcagaagaagaaccagaaggagctggacagcatcatcaagaagatcgactccgagtacgggatcaagatcaccgagcaggacttcttccagcacaagaagctggtgctgaagctgaagctgtggaacgagcagggcggcaagtgcctgtacagcgggaagaagatcgacatccacgacctgctgtacaaccccagcatcttcgaggtggaccacatcatccccaagtccatcagcttcgacgacagccggagcaacaaggtgctggtgtacagcaccgagaaccagaagaaggggaacaccaccccctacatctacctgaaggacctgaacgggaactggggctacaaggagtacttctcctacgtgtgccagctgcgcaagaacaacctgatcaccaagcggaagatggagaacctgctgttcaccgaggacatcaccaagatcgaggtgctgaaggggttcatcaaccggaacatcaacgacacccggtacgccagccgggtggtgctgaacaccctgcaggggtacttcaaggccaaggaggcccccaccaagatcaaggtggtgcggggctccttcacccaccagttccggaacaagctgtacctggagaaggaccggaaggagacctacgcccaccacgccgtggacgccatgatcatgtgctacagccagatgggcttcgacaagtaccacaagctgcagagcgagatcatcgacttcgagaccggcgagatcctggacatcaagcgctggaaggaggagttcaacgagaagacctacaacgagctcatctaccagaacaagatgatccagatccgggccaacatcaagaaggccgagaagcaggtgaagttctggcacaagcgggactccaagcccaaccggggcctgtgcaaccagaccatccgcggcacccggaacgacaacggcaccatcaagaaggtgaacaagctggacatctacgaccccagcggggtcgtgaccctgaagaagatgatctcccagggcaaggagaactgcttcctgatgtaccagcacgacaagaagacctgggaggacatgctccagatcatggaggagtacaaggaggccaagaaccccttcaccgagtacgagaacgagaccggggactacctccggaagtactccaagaagcacaacgggccccggatcaccaagctgaagtacctcgacggcgaggtgcgctcctgcatcgacatcagccacaagtacggcttcgagaaggggagcaagaaggtgatcctggagaactccaacccctaccggatggacgtgtactacaacaccaaggaccagaagtactacctgatcggcatcaagtactgcgacctgaagttctgcaaggacgggtacatcatcgacgaggagacctacaaccggatcctggtgtccgagaagatgctgaagcccgggcagacccggaacaacctggaggccctgggctacaagttcatgctgagcttctacaagaacgagatcatccagtacgagaagaacggggagcactacaccgagcgcttcctgagccggacgatgcccaaggcccggaactacatcgagaccaagcccgtggacgcccccaacttcgagaagcggaacgtcatcgggctggccaagaccaccagcatcaagaaggtgcggctggacatcctggggaaccagtactactccacctccgagaagttcaagaagatcgtggacacgatcaagagacccgccgccaccaagaaggccggccaggccaagaagaagaaggactacaaggacgacgacgacaagtga

SEQ ID NO: 281 - DNA, 3567 bp, synthetic construct
  source 1..3567: mol_type = other DNA
atggcccccaagaagaagaggaaggtgatggacaagaacgacttcaagaagacgaagtaccacctggggctggacctgggcgtggccagcctcgggtgggccgtgatcggcttcgacaaggagaaggactccaagtacctgcacgacttcggcgtgcggatctggaagcagcccgtgaaccggaacgggaagtccctgaccctgatccgccgccaccagcggtccgtgcggcggctggtgcggcggcggcagcaccgcatcagccgcctgctgaacttcctggtgtccatcaagatcctggagaagaaggaggactactactcctggatcatctacaagagcgagaaggagaaggaggagaagaagcccctgaacctgaagctcaagggcctggccggcaagaagctgcaggccctggagctggtgacctgcctggtgaactacgccaagcagcggggctactccgagctgttcaccaccctgcaggagaacaagaacctggaggacgagttcatctacgacgagaccaagatcgacaagaagctgcaggagatcaagaactggttccagaagcacgagaacatctccgagaagaaggacaaggacaacgccaccaagaagctgaacacccagaagtacctgctgggcatgaagaacgccatgtcctgcgagaacaaggagaagttccccagcgaggtgatcaaggactggaaggacaacaagaccaacaagctgttcttccggaagtcctggcagaaggagatcaccgagctgctgagcaagcagttcagcttccactcccagctgaacgagaagaaccgggaccgcgtgctgctgatcatcttcagccagcggtacagcgaggacggccccgagaagaacagcccctacatccacaagatgttccacaacaagatggccctgagccccttctccagcgaggagaagaagaccacccagcactacaccttctgggtgctgtacaagttcatcaagatcatctccctggccctgttcgagcgggtgaccagcgacaacgacgaggacaagaccgtggacaagttcaacctgcagaagctgctgcccaactggaccgagttcgccgagagcctgatctacgagttcctgaagctgaacaagctgagcctgtccaagagccgggagatcctggagaacttcatcgagaagaagctgcagaagcacatctccgacgacgtgatccaggagatcaagaacaagctgaagaacttctggaccgagcggaagaacgacttcacccagttcaagctgttcgaggccttcaagaagatcatcttcggcaccaagatcaccaagaaggccctcctgaaggagaagaacctgatgaacagcatcgcctacaagatgtggctgaacttcaccctgaagaagcggcaggaggagttcgagaagatgaagaaggacaactcccggaccaccgaggagatcgacaagctgaacaagatggggaagtccctgatcgagtcccagtacagcgtgcccaaggcccccttcaagcagcacatggtggccgtgatcaacaacttcgtgaacaacgaccggttctgcgacgtgaacccctacatctacgaggagaaggagagcaggaagctgatcagcgtgtccgccgagaagctgcggaagcacaagatcttctccaagttcctgtccgagcacatcgagtaccgggtggacaacccggtggccttccgcagcatcaaccaggtgcggatcgtgctgaagaagctgttcgcgaagtacaagaacttcgacaacatcaccctggagatcggccgcgacctgaacaccaagaaggagcaggagaccatccgcaagcggcaggccgagaacaacaagcagaacaagaagatcgagaaggagatcaagcgggagctgggctacgacagcgtgaacagcaccaagcgcctgcggtacaagctgtggaaggagcagaacttcgactgcctgtactgcaaccagaagatcgagaaggagaagatcttctcgatctacacccacatcgaccacatcatcccccgcaccaccaccgtgaacaacagccacgacaacctggtgctgtgctgcaccgactgcaacctggccaagggcaccaagctgatccggatctggaaggacaacaagttccagaactggatccagtccatcgagaagaagctgaagctgaacaagaagaagatctaccacctgaagctgcagaaggaggacctgaacaacttcctgaaccgggacgccgtgaacaacagcatcatcggcaagttcttcaagaactacatcgaggtgaacctggccagcaagaacatgaacacccccgtgaaggtgatgagcgggcggatcacccggaagatccgggacaagctgttccggtggaccagctggggcatcgagaaggacgagctgcggaagatcacccgcttccaccacgccatcgacgcgatctgcatcgccctgatggacaagcagaagatcatcagcttcatcacggactggatcaacatcaaccggtacaccaagttcaacttcgagaagaacgagaagaacaacgacatcgacatcctgaagcccaagtggaagcactccatcaacaacttccagtacttcaccgccaaggagaagaacgtgatcaacaagatcttccagtccggcaccaaggtggacaaccgcctgctgttcgagctgttcaagatcaacagcaacttcgacaccgaggtggagaaccggatgcccgtgctgctgaacaagaccctggtggagaagaacggcaagaagaagatggagatcgaggtgtccgacgtgctggacgagaacaagtacctggagaagatcaaggagtacggctaccagggggacatccactaccccttcatctccaagcagatcatcaagaagatccccaagaccctgtccggggagcagcccatcaagctgaagggcaaggaggacaaggacgagtacctgtccaacgagtcccagaccaactactgggacgcccggaagtactacgggttcaacctggaggggcagtggctgctgaacaagaacttctggaagaagaagcggcagacccggtactgcgagaagtgcaacaaggtgaagatcgggaaggccaccttctggatcgacgagaacaagaacgagcagttcatctgcaagaagtgcttcaagaaggagaacttcagcagcgtctggaacaagaccaagttcatcacccagaacgagaccctggagtggaagatcaacgagcactactactactacagcttcctgggcaagcacgggaacgccatcgacctggagtccctggggctgaagaacttccgcttcgaccccaagtccaagaacttcaagaagaactcccccgagaaggggttcagcgccttcctgaagaagttcaagaacaacgagatcaaggtgctgaacatctccctgctcgggaagaagcagacccgcagccggaagagacccgccgccaccaagaaggccggccaggccaagaagaagaaggactacaaggacgacgacgacaagtga

SEQ ID NO: 282 - DNA, 4167 bp, synthetic construct
  source 1..4167: mol_type = other DNA
atggcccccaagaagaagaggaaggtgatgtactacggcgggatcgacctgggcaccagctccgtgggctgggccctgaccgacaccaactaccggctgatccggaagaagggcaaggacctgtggggcgtgcgcctgttcgacgaggtgaagagcgcccaggagcggcggtccaaccggaccgcccggcggcgccgggcccgggagaccgcccggatcggcctgctgaagagctacttcgccgacgagatcgacaaggtggacaccggcttctaccagcggctggaggagtccaagtaccacaaggaggacaagaagaccggcaaccggttcgccgtgttcgccgaccgggagttcaccgaccgggagtactacgagaccttccccacggtgttccacctgcggaaggagctcctggagtccgacgcccccttcgacgtgcggctggtgtacctggccgtgctgaacctgttcaagcaccgcggccacttcctgaacgagtacctggagtgggaggagcacgacaagaacatggccgacctgttccgggagttctacgagaccctcccggaggagagcgagctgcacttcccccagaccgccgactggaccctgaccgaggagatcctcggcagccggctgttcagccggtccgagaaggcggagaagctggccgcctgcctgggcatcgtgcggaaccagaacaaggccgagtacgagatgatcaagctgttctgcggcatgagcggcaagctggccctgatcttcggccaggagatcgccgccgatgcctacggcaagaagcagctgagcttccggagctcctcctgcgaggaggagatggaggccctgggcgactgcctgcccgagggctacatggacatgatcgaggccgccaagcggatccacgacaagggcctgctggcccacatcctgaagggccacacctacctgagccaggcccgcgtggagacctacgagaagcacaaggaggacctgaagaagctgcggcacgtcatgaagaagtactgcaaggacgagtacgacgcctacttccggacgatgaccgaccacaactactccgggtacgtgggctccgtgaactccggcaaggagaagatccgccggaaccggggcgccaagaaggaggcctacaaggccttctggaaggagaccaagcggctcctgaacctgatgccccaggaggaccaggaggtcttctacctgaagcaggagctggagaaggagaccctgctgcccaagcagcggaccttcgagaacggggtgatccccaaccaggtgcacctggccgagctgaagaagatcctctccaacgccgagaagtacctgcccttcctgcgggagaaggacgagaacggcctgaccgtgaccgagcggatctgcaagctgttcgccttccggatcccctactacgtggggcccctgtccgtgaagggcggggagggccggaactggatccagcggaaggagaccggccgggtgctgccctggaacatggaggagaagatcgacatggccaagacccgggaggccttcatcctgaagatggtgcggcagtgcacctacatgaagggcaagaacgtgctgcccaagaacagcctgcggtacgaggccttcatggtgctgaacgagctgaacaacgtgaagatccgcggggagaagctcgacgtgggcctgaagcagaagatctaccgcgagctgttcctgaccgggaagaaggtcaccgggaagaagctgttccagtacctgtgcgtcaacgggatcctgtcccccgacgagcaggaggccgtgaccgggatcgacgagaccttccaccagtccctgaccagctacggccggttccggtccatcctgggggacgagatcgagaaccgggagatgcagaagatggccgagcagatcatcttctggggcaccgtgtactccaacgacaagaagatggccggggagctgatgcgggagacctacggcgagctctccgagaagccctacctgaccgagtcccagatccgccggatctccggcttcaagtggaaggactggggccggctgagcaaggacttcctggagctgcagggctgctcccggaaggacggcgtgaagcggtccctgatccgggccctgtgggagaccgactgcaacctgatggagctgctgggcgccgagttcaccttccgggacaccctgaccggccagatccaggagcaggagaagctgctcggggagttctgctaccacgacctggaggactcctacctcagcgcccccgtgcgccggatggtgtggcagaccatcctgatctggaaggagctgtgccagctgatgggcgaggcccccgcccgcctgttcgtggagatgccccgcggggagggcgagaagggcaagcgcaccgtgagccgcaagaagcggctcgaggagctgtaccaggcctgcaaggccgacagccggaactggctgaaggagatccaggacctgagcgaggacgacctgcggtcccgcaagctgtacctgtactacacccagcggggccggtgcatgtacaccggccaccccatcagcctggaggacctgctgctggggaaccggtacgacatcgaccacatctacccccggcacttcctgaaggacgacagcctggagaacaacctggtgctggtggagaaggagtccaacgggcacaagtccgacaccttccccatcgaggccagcgtgcggcgggaccgccaggggctgtggaagtccctgaaggacgggggcttcatcagccaggagaagtacaagtgcctgacccggtcctgggacttcaccgacgaggagctggccggcttcatcagccggcagatcgtggagaccgggcaggccaccaagtacatcaccggcctgctggacaggctgctgcccgagaccgagatcgtgttcgtgaaggccggcaacgtgtccgccttccggcaccagaccgagctcctgaagagccggctggtgaacgacttccaccacgcccacgacgcctacctgaacatcgtggtgggcaacgtgtactacaccaagttcacccagaaccccgccaacttcatccgcgcctaccggcgcgaccagaagggcaacgcctaccacatggacaagctcttctggtacgacgtggtgcgcaacggggccgtggcctggaaggccggccaggccggcaccatcggcaccgtgcgggccatgatggcccgcaacaccccgctgctgaccaagcgggtgtacgaggcccacggcggcatcgccgagcagaccatctactccgccggcgaggccaaggagcgcggctacatccccgtgaagagcggggatgagcggctgcgcgacgtgaccaagtacggcggcttcagcagcgtgagcggcgcctactacttcctggtggagcacgagaagaagggcaagcgcgtgcggaccctggagcagatgcccatctacctgaagacctccctggagaagaacgaggaggcctggaagaactactgcatcgagaccctgggcctggtgagccccgagatccgctggaagaagatccggatgcggagcctggtgaagcggaacggctacctgatgaacctggccggccgcaccgggcggcagatctacgccgagaacgccgtgtccctgtgcctgtcccagaagtgggtgaactacatcaaggggctggagaacttcaaggagtccggcaaggaggaggaccggcgggagaacaaggagaagcggatcaccaaggagaagaacgagctcctgtaccaggagctggtgatcaagcacagggacaccatctaccggcggaagcccaaccccatctggaccaagctgatcgagaagcaggccgtgttcgccgagctctccgtgcgggagcaggtgaacgtgctgctcgagctgctgaaggtgacccagtgccagaacctgagcatggacgccaaggagatcggggtgaaggcctcccccgacaagatcgggatcgaggtcaccgcccaggaggagttcctcctgatcgaccagtccgtgaccgggatctacagctgcaccatcgacctgaagaccatcaagagacccgccgccaccaagaaggccggccaggccaagaagaagaaggactacaaggacgacgacgacaagtga

SEQ ID NO: 283 - DNA, 4167 bp, synthetic construct
  source 1..4167: mol_type = other DNA
atggcccccaagaagaagaggaaggtgatgggcaacacccggggcaaggacaagtactacctgggcctggacatggggaccacctccgtgggctgggccgtgaccgacgaccggtacgagatcatcaagcggcacggcaaggccctgtgggggatccgcctgttcgagcaggccaacaccgccgaggagcggcgggccttccggaccgcccgccggcggaccgagcggcggaagaaccggatctccctgctgcagcagctgttcagcgaggagatcgccgccaaggaccccggcttcttcgtgcggatgaaggagtccaagtacatccccgaggacaagcgggacctggagggcaagcggcccgagctgccctacaccctgttcgccgaccaggagttcaccgacgtggagttccacaagcagttccccaccatctaccacctgcggtacgccctcatcacccagatgaacgagaagccggacatccggctgctctacctggccctgcaccacatcctgaagcaccggggccacttcctgttcgagggcaaggagatcagcgagggcatgaacttctccgccgccgtggaggtgttcctggactgcctggaggagaacgggatcgagctgtccgagttccagcaggaggacaagatccggaagctggaggagatcctgaccagctccgacagctcccggaccgagaagaagaagcagctgtgcgacctgttcgccggcaaggacaagcagaagatggccctggccggcctgatcgccggctgcaaggtgaagctgtccgtgctcttcgacgaccgggccctggacgaggaggagcgctccgagatctccttcagcgacgacaactacgaggagtacatctcccaggtggaggagatcctcggggaccgcttcctgctcatcctgagcgccaaggccatcttcgactggtccatcctgtccgacatcctggggacctgcagctacctgtccgaggccaagatccagtccttcgagaagcacaagcgggacctgaacaagctgaagaacctgctgcggaaggaccgggcctgctaccggaaggtgttcggcgagcccggcaagaccgccaactactccgcctacgtggggatggtgaagaagaacggcaagaagcagcccatcaacaagaactgcagccgggaggacttctacaagttcctgaagaagaccctgcaggacatcccctgcgccgagaccgaccggaaggtccgggacgagatgctggaggagatcgagaaggggaccctgttccccaagcagatcctgcgcgacaacgccgtgatcccctaccagctgcacgagaaggagctgaacaagatcctggagaacgccgtgcgcttctaccccttcctcgagaagatcgacgaggacgggtacagcgtgagccagaagatcaaggagatcttccggttccggatcccctacttcgtggggcccatcaacacctaccacaaggagaagggcggcaacagctgggccgtgcgcatcgggaacaacaccgacaagatctacccgtggaacttctccaagaagatcgacgaggagcagagcgccgagaagttcatcaagcgcatgaccaacaagtgcacctacctcctgggggaggacgtgctccccaaggagagcctgctgtacgccaagttcaacgtgctgaacgagctgaacaacctgcggatcgacggggagctggtctccgtggagatgaagaagaagatctaccacgacgtgttcaagcggcacaagcgggtgaccggcaagcgggtgaaggactacctcatccgcgaggggctgatcaccaaggagcaggagctctccgggttcgaccagaacttcaagagctccctgaaggcctacatggacatcaagcagatcaccaccgggatcagcctcaccgagcagcagcaggaggacatcatcctggacatcaccctgttcgccgacagccccaagatgctgaagcggcggatcaagcagaagtacccccagctgagcgacaagcaggtcacccagctgtccgagaagaagtactccgggtggggccggctgagccgggccttcctggaggaggtggaggccgtgaaccccgagaccggggtggccatgaacctcatcaccgccctgtgggagaccaacgacaacctgatgcggctgctgagcaagaagtacagctacgccgaggagatcgagaagcggaacgcctggggcgactccgagtccgagatctcctaccagaccgtgcaggacctgtacgtgtctcccgccgtgcggcggcccatctggcaggccctgaagatcgtgaaggagatcgagcacatcatggggtccgcccccgagcggatcttcgtggagatggcccgcgagcccggcaagaagggcgagcggaagatctccaggaagagccgcctgcaggagctgtaccgcttctgcaagaaggaggccagcgagctgtacgactccctgtcccagaaggacgacaacgagctgcgcagcgacaagctgtacctctactacacccagatgggccgctgcatgtactccaacgaggtgatcgacatggaggagctgttcaccaaccggtacgacatcgaccacatctaccccgcctccaaggtgatggacgacagcctggacaaccgggtgctcgtgaagagcgagcgcaaccggtccaagtccgacaccttccccgtgcccgagtcctacgtgaagcaggccggggacctgtggcggaccctcctggagaagggcctgatctccaaggagaagtaccaccgcctgacccggcgggacagcttctccaccgacgagctggccggcttcatcgcccgccagctcgtcgagacccggcagtccaccaaggccgtgacccagatcctgaacaaggcctaccccaagaccgagatcgtgtacgccaaggccaaggccgtgagcgacttccggcagcagttcgacctgatcaaggtccgggacctgaacgaccaccaccacgccaaggacgcctacctggacatcgtggtggggaacacctactacgtgaagttcaccaaggacgccagctggttcgtgaagaacaaccccgggcggacctacaacctgaagaagatgttcgagaacgacgtcaagcgcggggacgagatcgcctggaccagcggcgggaaggggaccatccacaccgtgaagaagtggatgcggaagaacaacatcctgttcacccggaaggcctacgaggtgaagggcggcctgttcgaccagcagctggtcaagaaggggaagggccaggtgcccgtgaagggcaacgtggaggacacccggctggcctccatcgagaagtacgggggctacaacaaggcctccggcgcctacttcatcctggtgcagtccgacgacaagaaggggaaccccatgatctccttcaagttcgtccccgtgtacctggcccagaagctggaggagagccaggagaacatgctccagtactgccggggcgagctggagctgatcaacccccgcatcctgatccccaagatcaagatgggggccctgctggaggtgaacggcttccggatgcacctgtccggccggaccgacaaccggctgctgttcaagggcgccaaccagctggtggtgtccgagaacatccagaagaccatcaagaaggtggggaaggtgtgcgccgactacgccatcaacaagaacgtggaggtgtccgacaagatgggcctcaacgaggaggagctgatgcgggtgtacgacaccttcgacgacaagctgaagaacaccatctacggcaaccagctgtccgcccagatcgacgccctggagaacggcaaggagaagttcgtgcacctgagcaaggtgcagcagtgcctggtgctgaacgagatcctgcacctgttccagtgccggtccgtgctgtccgacttcaccctgatcggcggcttcaagcgggccggcaccatccggctgaacagcaacatcagcaagctggagcgggtgttcctgatcaaccagtccatcaccggcttctacgagcaggtgatcgacctgaaggccctgaagagacccgccgccaccaagaaggccggccaggccaagaagaagaaggactacaaggacgacgacgacaagtga

SEQ ID NO: 284 - DNA, 4347 bp, synthetic construct
  source 1..4347: mol_type = other DNA
atggcccccaagaagaagaggaaggtgatggacaagaacaagccctactacatcgggctggactgcggcaccagctccgtgggctgggccgtgaccgacgaggagtaccacctgctgaaggggacccaccggatcaagtccgagaagggcaccaagaacaagaagcagaccctgtggggcttccgcctgttcgacgaggcggacaccgccgccgagcggcggacccaccggtccgcccggcggcggggcgcccgggccaagacccggctgaagctgctgcggatgctgttccgggacgagatcgtgcaggtggaccccgagttctacctgcggctgaaggagtccttctactacgaggaggacaagaagctgcagaagaactccaagaacaccctgttcaacgacgccaacttcaccgacaaggacttccacaagaagtaccccaccatctggcacctgcgccaggccatcatcaaggccgacaagatcgagtccttcgacatccgcctgtacttcctggccatccagcacatcctgaagcaccggggccacttcctgttcgacgggaagctgaagaacgggcggggcgacttcggcgagatcttcgccgagttctgcgacatcgccaagagctacggcctggagatcgaggagtccatgcagtccgaggtggagcggatcatcctgtccgactccaccatcacggacaagaagaagcagctgaaggacctcgccctgttcctggagcaggacgaggccgaggacgccaagacgctgctgcggcagcagcggtgtctgtgcgacctcatcgccggcggcagcgtggacctcgccaagctgttcgccctggagctggacgagaagtgcagctacaccctgagccagctggacgagaaggaggacgagatcgccgggaagatcaccctggacaacatgcccctgctggtgagcgccaagaagctgtacgactacggcatcctgtccaagctgctgggcgagcacagcatgctgagcgacgccatggtggccaactacgagcagcacaagaaggacctgaaggagctgaagcgggtgttcaagccccacgagaagatctacgcccagctgttcaaggacaacaagtactccaagaagagcaacaagttcgacgtgtccaagaacagctcctacgacgcctacgccggccacgcctaccagaaggagggcgaccggaacgggcacgtgatcgtctcccaggaggacttcaacaagcacctgaagcggctcctggaggaggtggggtacaacggcgagctgctgacccgggccgagaagggctacctgctgcccaagcagcggggccaggccaaggggaccatccccatgcagctgcacgccaacgagctggaggtgatcctggagaagctgcagcgggacttccccagcttcgccaaggtggtgcccggggaggacgagacctgcaacaacaaggccaagaagatcatgaagatccacgagttcaagatcccctactactgcggccccctggtgaagcggaagttcgacgacgacggcaactccgtcgccaacggcaagtcccagttctcctgggccgacgaggagatcgtgaagctggtgtacccctggaacttcgacaagctggtgaacaaggacaagcgcgccaagaacttcatccggcgcatgaccaacgagtgcacctacctgatcggggaggacgtgctgcccaagtgctccctgatctaccagaagttcatggtgctgaacgagctgaacaacctgaaggtgaacggccaccggatcgacaacagcatcaagcagcagatcttcgagcgggggtacaaggagggcgagatcaaggggaacatcaccctgaagaagctggagaagtggtgcaaggacaacagcttcatcggcgccgacgacgagctgtccggcaccaacgaggtgaagatcctgcccaagtaccagacctaccaggacttcagccgggtgctggggatcgacttcgagaagaagtaccccgccaccaagctggagaaggtgatcgagctgatcaccatcctgtccgacgagaagtccatcctgaagaagtccatcaagaccgagctcaactgcgacgacgagctcaccacccacctgtccaagctgtcctacaaggactgggggcggatgtccgcctgcttcctgaacgggatcaacatcaacaaccgcaccatcatcgagtacctgtgggaggacaacaacaacctgatggagctgctggggcaggaggtgggcttcgggaaggtggtggaggagttcaactccgacaagcggtccaaggccaccaaggtgaactaccgcgacatcgagaagctgtactgctcccccgccgtgaagcggtccgtgtggcagaccatcaagatcgtgaacgagctgaccgagaacctcgggtacgcccccaagaagatcttcctggaggtgacccggggcgaggacgagaaggccaaggggaagtacaccctggcccggaagaaggacctggaggccaagctgaaggccgtgaagaccgaggacacccgggccatcatccgggagctcgacggctacgaggaccgcgacctgcagtccaagaagctgttcctgtacttctcccagatggggaagtgcgcctacagcggcgagtccatcaacctggaggagctgaactcctccaggctgtacgacatcgaccacatctacccccgctccaagaccaaggacgactccatcacccggaacctggtgctggtgaaggccagcctgaaccgggagaagaccaacacctaccccatcagcgacagcatccggaacaagatgcacgccatgtggggcgcctggtaccactccgggctgatcaccaaggagaagtacgagcggctgatccgggggtccgagctcaccaacgacgagctcgggggcttcatcgcccggcagctggtggagacctcccagtccgtcaagtccatccgggacctgctggcccgggcctaccccggcaccaacatcgtgatggtgaaggccgggcaggtgtccgagttccggcacatgatgtcctgcgacaagaaggactgcgacgggaacgtgtaccggcccggcaagtacgagttcatcaaggtgcgggacatcaacgacctgcaccacgccaaggacgcctacctgaacatcgtggtgggcaacgtgatcaacgagaccttcaccaacgacccctacaagtgggtgaaggaccggaacgggaaggagtactccatcaaccagaagcggatcttccgcgagtccaaggtgtaccggaaggccaacggggaggagacctcctaccccgaggtgcaggcctggcagttcgccgacagcatcaagctgatctccgacgtgatgaagcggaacgacgtgatctggacccggatgaactacatcgagtccaaggagatcagcgacctgcagctggtcggcaagggcaagaacgccgacgggctgctgtccatcaagcagcagaagcggctgaaccccgagaagtacgggggctacaacagcctgaagggcgcccacttcgccctgatcgagtgcaaggacaagaagggcaacgtgcagcgccggatcgtgcagatccccatcatcgccaaggacaacatcgagaagtacatcgccaacaactactccgaggcgcaggtgatcctgcccgtgatcaagtacaagtccctggtgaagatcaacaacttccccctgcacatcgccgggaagaccagcagcggcctggtgctgtacagcgccaagcagttcctggtggacgaggacaccagccgctacctgaagctgatccagaaggtgatcggcaagatcaaggccgccaagaaccactacgaggccagcagcaaggacgccgtgtcccagtccgagaacatcaaggtgatgcggaagatctgcgaccggctggagatcctgtccgagatgcccagcttcggggacaaggtgcaggagatcaagaagtacaacgagctgaagttccagaacctggacctggagtcccagtgcaacatcctgaacaacatgatgaaggtcaccaagtgcaacgccgagaccggcgacatcagcatcctggtgcccaagtccagccacctgggcaagcccacgatgcccgaggacatcatgccccggtacagcgccgtggccctggtgaaccagagccccaccggcctgtacgaggagatcgtggacctcaagaccgtccagcccaagatcaacaagcagggcgagaacaagagacccgccgccaccaagaaggccggccaggccaagaagaagaaggactacaaggacgacgacgacaagtga

SEQ ID NO: 285 - DNA, 4476 bp, synthetic construct
  source 1..4476: mol_type = other DNA
atggcccccaagaagaagaggaaggtgatgaagaagctgtcgatcgccatcgacatgggggccaagaacaacggcatcttcatggtgaagaccgacggcgacaagatcatcgacaagaaggcctcctgcatcgtgatcgacggcaacaagatcaacttctccaagaagtcccggcggaagaaccgccacaaggaccgcaactacaagcggcggaagctggccaagcggctgctggacgagctggtggacatgagccagtacgaccagaagcaggccgagttcatcttcggcaccctgaacaaccggggctacaccctgctgagctccgagaacgagttcgaggagctcagcgacgagacgatgaagttcaacaagctgtacctggaggccatctccgggcaggccaccaaggagaagttcgagctgtacttcaccgacgagttcgacgacgacaaggccctgctgaacttcctggacaccaacatcaagaacatcaagaagaccatcagcaacctgatcaacttctccaagaaggacaagatcctggacgacctggtgagcctgaagaccaacagcatcaagaagttcaacgccttcagccacgtgaagatcctgctgtccaagtacggctaccgggacctggggaagaacgagaaggacatcaccgagaagctgaagaacaacaacatctacctgtccaagttcgacttcgacaaggagaagcaggacatcgagtccctgaacttcgacaaggagtccgtgaaggacaagtccatcatcaccaaggacctgaagctgctcaaggagttcctgagcggcatccagaaggagatcgccaccggggccaagccccggaagcagtacctgaaggagatcaaggaggagatcgagaagcagttcgacttcatccagaacttcaccaaggacgagttcttcaacatcgtgggcaacatcagcaacctgcagctgcggatcctgcggaagttcttcaacaagaactccaccaagaactcccagctgcaggtgctgaagcggtacttcgtggccttccactacaaggacgaggccaagagccgccgcaagaagctgttcgtggagctgaacaagcacaacgacatcctgtccttcttcaagacctgcgaccccgagctgaccagccctccctacgaggacatgaacaaccgggacacctacaagtgcaacagcatgctgatcaagcccgagctgatcaccgacgacatcaagaaggccatcgacatcctgctgagcaaggacgagttcgccaccatcacgcaggagatcgacaagtccaccggggagttcaagcacatcggcatccgggacaagcgggtctccaagcaccagaagctgagccagaaggagctcagcaagtacaacaacaccgacaaccacgcccccatcatctaccagtccaccgactggacctacagcaagtacctgcagcggatcttcgacatgaagctcttcgacaagatcaccaagtacaagaacgccgacaagatctacgaggagaacttcaacagcttctaccacccccggaacgtgttcaagcacaccaagaagttcgagaagggcaagatcgacagcatcgagctgttcaagaagctgttcggcaaggacacctacgacagcctgaagcccatcgccgagatctactacaaggaggagcagaagatcaagaacgggatctacagccacgacaccagcgtgttcgtgaagtgcgggaccaacaccccgtacaagaacaacgccaagcacatcctgctgaagcccctgtacagctacagcttcacctccgacgagtccgacaagtacctggaggccatcaagaagacccgggggctgcagacccagctggagctgatctccaacgaggccaagaagcaccagaacggcttctacaacatcgtgaaggcctgcttcgacgacgacaagtgcgtggccgacaaggagatcaagaagatcatcaccaacctgaaccccaacctggaggccatccagacgatcttcaaggacctgaacatcgaggccaagtacttcaactccatcgagaaggtggacgagaacaacctcaccaccatcatcaacatcctgaagcagaccttcgagatcctgttcaaggagctgagcgggttcaacaagacctgccagaactgcaccaaggagaacgccacccggtccgaccagaccttccccatcgcccagcggctgctgagcgacgtggccaagcccatcgacggcatgctggacatgatgatcgaccggctggcccacgagatcaccaccaacatcgacaagtccgacatcgaggacatcgtccagctggacatcctgctggagcagaaccggttcgagttcgaggagaacctgaacgtgatcaagcgggccagcaacaaggacatcaagaagctgaagcgggagtacaaggaccggctgaacatcgacatctgcccctactccggcaagcagttcgacaagggcgactacgaccacatcctgccccagtccaagggggtgtacaactccaaggccaacatgatctacgtgtccagcgacggcaaccagaacatcaagggggccaccacctggacgctggacatgctgaagaagccccacctgaacacgatgttccacaccgacaacatcaaggagatcaaggagttcatcaagaccaacatcgcccggatcgaccagacgaacttcaccaacttcgacaacctgaagctgaacgagcagatcgccttccggtacgccctgttcatggagcacacctccagcgagttcaagaccgccttcgacctgctgaagaaggacaagctgaagaccatcaccaacgggacccagaagcggctggcccggctggtgtacgagaagctggtgcagaagttcccctacgagttcaacgccaagaacaagaacaagaccctgaagatcgacgtgaacagcaagaccatcgactacaagctggtcagcaccacccggcggtacctggccgtggaccagaccaccggggagatcaaccacctgttcaaggaggacatccaggacagccacagccactgcatcgacgccatggtggtgttctacctggccaactccgacgcccagaagatcaagcggtccgacaacctgtcggacaagatctccaagcgggtgttcaacttcgacttcaaggacatctacgtggaggagtcctccatcaacaacatcgccaagaacaagaccttcatcaacagccccaagaaggagctggggagctacaagctgttcgacgacaccatctacagcgagaactacaagcacatcaccaaggagaacaccaccaagaaggagctggagatcctggtgaagtacctgctgctgttcgtgtacgagaaggggaagaagatcgtgatcgacaacatcgagaaggtgaaggagaagacgatctacaagatcgacatccagaaggtgtccaacaccatctacaagctgttcaacaacaaggacaagcccgggctggtgagcctgaagttcctggacaagtaccagtacttcaccagccggaaggagatccagaacatcttcttcgacgacaagaagaccaagctgctggagtacgagaagatcaagaacatcccgtacttcagcaacaagctgtacaaggccgtgtacaagaagctgctggaggagaagaagctgttcgacatctccgacgacaagaagaccatcctgaacagcaagatcctggaggagctgctgcaggacatgttcgactccaagcagaaggccgagaacaagaagcagcggaagcgggggaagaagcggcacaagtacagcctgcccatcctgggcagccccaagttccgcatcaagcggggcaagacctggcaggtcctgggcaacaaggacatcgccaccaagaactacatcatcgacggcgacatcaagcccgtgccctacttcagcaagaacaccatccccctgaagatcaaggacctgatcgactgcctcctggtgaacaaggacgacaagaacatctacagcgtgaccatcgacaccaccaagatctgcgactacgtgagcaacctcacgtacctgatcaccgaggccaagcggtgcacggtgatcagcaccttcgtgaaggcctccttcgtggacgtggacatctcgagcgtgggggtgttcgacggcgccaaggacaaggtgttcgagagcttcatcgccaactacatcgacaacaaggacctggagctgagcaagtacatcggctccatccgggacggcatcaacgccaaggccaccatcgtggacaacaacaaccagaccatcaccctgaagtacaaggcctccatcaacaaggacaagaagcagatcatcctggacaacctgaaggacaagaagagacccgccgccaccaagaaggccggccaggccaagaagaagaaggactacaaggacgacgacgacaagtga

SEQ ID NO: 286 - DNA, 4974 bp, synthetic construct
  source 1..4974: mol_type = other DNA
atggcccccaagaagaagaggaaggtgatgaacaacaaccaagtactctcccccattgcaattgatctgggcgctaagaacactggagtgtactttgcgcactatccagacctcgataatctgaataaggaggacctgaagaagttcagcagcatccgcacttttatcatggacaagaaaaccttctccttgctgatgaaagaccgcacagccaggcgacatcagaaacgggccaatattcggagtaaactggcaaaaagattcttcattcttatcgctcgccaggagtatcccgaactgtttgaggatgacaacaagattaacgagaatatcaagatcgctatatcttatttcttgaataggaggggctttagctttgctagtgctctcgagaagcttgatgacgaagataacaagctgttgggaaaactgccctctcatttcgtagagaaaatgctttcagccttggaaaagaacgaatattccaacggcaaagagattgccagactgatcagagccatcgtctctgacctgaatgaaaaggatctgaacctgcttgagttcgtgaagtacagaacaaattctcccaatgaatatagcgagctgcagaagctgctcagggttccgattgacgagtttaagaaagaactgcgaaaagaaattgccggcctggacaaaatcaacgaagacaaaaagaggaaaaaactgatcgcggataaaaaaaagaaaatcacagaggagtttacaaccaggtttggcatcctccggttcaatgattcagaacctaagctccccaacgatgaaaatggggaccctgactatagcatcagcgaagagtcaatccctgacgacataaacaacacaaacgagagactgaaccactactacaaatgggtcctctattacctcttcgaaataattaacgagactggaaactaccacaggaaagattactttgaaaactgtagaaaggactatgagtccgccaacaacgacacatctattggcaaatgcattaggcagctccgagagaagatcggagacaatcgaaagatagagtttcaaaacctgctcttcaacataagtaatttccagttgcggctcttccgcaagttctttaacaacaaagagcatcagactggcgacaaatgggagcccgaacgactggacaaaattttcataagatatatccggtcttggcatgtggacgctcaaaaggatggcgccgacaagctcaagatccgaaaagatatacttagtaactttcatagtcttatactgacccacggcagtcggaccataacttttttgaaaaacacgacccctaccgacactattccgccctacgaggatcagaataataggaacattccgaactgccagtcccttctcattaatctcgactacttctcaaacaagaagcagttcaagtacttcaacgaatggtacgaaatcctgactaccaagaaattcgccgccaatttggactctaagatggatcttagtctgtcagtggagatcaataacaccctgtccagttacgacaattatctgaagaggacacagagtaaaacacacagcattaatacatacttgaacaagatcatcaaagacactaagagcaggaaactggccttcgtcctggattctattagaacactgcataagggcaaaaaaaaggacgccgtcgagtatctcctgagccacatcgagcaaaacagcaataacaatgagatcaagattggtttctcagattttatttatcagtactattgggcaattgacaactccaagaacacaaaggttaatcagctgaaatatactgtgaataagaacgagaatcctgacccaaacattcagaagaactttcctaagtacataaaaaactatttcaagcagaactccatcctgcttgaatgtgagggaaaaaccccaagtaaaaacaacacgttcatcgagtctatctgtaatattctgctgatcctcaagagcgacatcaaggaggacttgatcaatgacaaaaataaaataaacgaactgcagaacaagcttattgacggcttgaaatcaaagaagataagccggtctagcgtctactcacacttggagaaatgcgcaaaagcccagaaggactataaaaacatactcaacgagaaactcaaggagattaagaacaaagaggacaccatcgacaaggaggataagcccctgaaaaatattagtgacaatattgagattgctaccgatgagattattaatgttgctaacacaactttccagattaataagcacttgatcgacagaactaagattaataatatatatacccacgctcaattgttctctttccttgacgaccggaaggggtactccaccatctgccggtactgcgtcgaggacaacctgatcagactcaccaagattaataacaccgagaagcgcatcacacataggctgtctgccagctctgttagaattattgacggtgtggtggaaaagtatctgggccatcttgcacgcattattgcgaatagtaaatggcaacagatcaagagttacaacctcgaaaaaggtgccacagtgaatataccagtctttatcgaagagaataagtttgactttgaggtcaatctttcaatctataagggtaagaatagcaagaaggtaaagaagtcaaagatctactccctcgaggacaggatcaaggacactaatatcgatatctgtccttacacaggcaaaaagatcaacaatatgggggagttggatcacatacttcccagaagctataccaccaagtacttcaaacaggtttttaactctgacgctaacctcatttacgtgtctcaagaagggaacagggataaggaggatagactgtacaagctttccaatctcaacaccaattatttgaaggttgtatttccggattgcaaggacacggacgagataagcaataagatcattgctaacatcccaaagattctcaaggactatagtaacttcgcgaacttgaatagcacggatcagcacatcttgcgccatagcctttttctcccagagaatcatccaatgcgcaagagagttattgaagaggtgctgatgacacacaataagactaaggtcaacggcactcaggggtacttttgcaaacttctgcgggacgaactgatccagagaaataatggggagttcaatctggatttttactttcagagaatccccgccctggaggtgtcttattaccgcaagacgttgtccaaggaagagcaaaagcaggaaaagcagccaccttactcccactgcatcgacgctatgctcatctttactacaggcatgctgaatatttttgacagctattccgacagtaacaagatagagaacctggtccccatacaacaatcttggaaacttgctaacgtcctgttgtctttgctcacatctaagagcaataagaatatacaggatacgaaacagctgttgcactccatctacagtctgatcaaggtgaatgagtctgaccactctgttattcctatcgagcgcagtacacgggacaccatcaacgtgagccataggaaactgtacgaagataacttctacgctctccgcatttaccccctgtggctgggttgtaaaaagcagaaaaaagagagcgagattatcctgtcctatggctttaatgaaaaaactatatccgatctgtcagtgaaaaacaaaaaattgattctgaagtacctttacctgctctccgaggacagtgtgacaaagctgagaaactgtggtatctccgacgagctgatgagtaagaagctcagcgatatcgagctgattgccgtcgaaaacaaactgcaaaattacttttctaccagcaatcagaaacttttttggttgaatattgaccgagccaagttcctggagttctataaagacaacaacatatacctgaacaaggaatccgacaaggatgaggatgttgtgtactataaagtcgtgtccaatgagcttacatacaaaacgaccagagaatctctttacaacatcttttatgacgagaaagggaatttcaataagaaaaagttgtccaaggagcatatcaaggaaagcactaatgaccccaatgttgaaaagatcctcctgaagatatacgacaatctgatcaagagtgctaatcctgatcttttcgctgacgacctgaagggtaagaaccgagacatagagatcttgaaagaaatctttcagaagcctcggattgagctgaaccatcgctcctacaaacagaagctgagtatcccaatcaatagcaaggatggagcctatattacgtaccgcaagggttgggacaacagtaaggttatccagatttctaaaaaaagcaacaacgtcccacagaaaaaatattatattgacacaagcaagctgaaagagcagaccaacgacatttacaacaccaaaaataataagtctatcgacgtgaatgacattatttcaaagcacgctatcgagattaaaaaggggacagagattaatatcaaaaaactccttattgatttcagcaaatacagtaactttcttaagactcttgacaacattattatcatccagataacaaacaggcttgatctggaactcctgttcaaacagaacgtgaagatcgacgacatcctgaagaagtccatccatactctgttcgacatcagaaacattgccgaggaaattaagaagaacgacgataaagatgtggaggatcgcgtcagtgaaaaaaccattgtggataagcatctgctgttttactccaatgtgaacagcaacagcgtgatcatgaccgtgaagggatgtaggaagtttatgggcaagtctttcaaaaagctgctccccaattatatccttaataataacaagagacccgccgccaccaagaaggccggccaggccaagaagaagaaggactacaaggacgacgacgacaagtga

SEQ ID NO: 287 - DNA, 4155 bp, synthetic construct
  source 1..4155: mol_type = other DNA
atggcccccaagaagaagaggaaggtgatgtccgagtactacgtgggcctggacatcggcacgtccagcatcggctgggccgtgaccgacaccaactacaagctgcagaagttcaacggcaagacgatgtggggcgtgcggctgttcgacgaggcccagaaggccgaggagcgccggatcttccgggcctcccggcgccgcctgcagcggcgcaagcagcgcatcgagtggctgcagaacgtgttcaaggacctgatcgggcaggtggaccccggcttcttccagcgcatgaaggagagctacttctggctggaggacaagcagctggacaacggccagcagaccaagtacgtcttcttcgccgacaagaacttcaccgacagcgactactacaagcggttccccaccatctaccacctgcggaacgcgctgatgcacgagtccagccccttcgacatccggctggtgtacatcgccctgcaccacatcttcaagtaccggggccacttcctgtccgacgccgacgccaaggccttcaaggccagcagcctggccgacttcagcaccaacatccagaaggtgaacgagtacctggacgacgccttcagcgacggccggtgcctgagcgtggacaacgtggacgacctgctggtcatcctgaccgaccagagcctgtccgcctccgcccgcttcgacaagatctgcgagcggttccccgtggagaaaacgatggagggggtgcggcagatcaaggccatcttcaagctgctgtgcggcctgaccgtcaagctggaggacatcttcgacaacgagctgctgcaggacggcgagatcaagaagctggacttcaagtccgacttctccgaccaggaggaggtcctgcggtcccagctgggggacgactacttcctgatcgacgtgctgaagcagatctacgacttcgtgatcgtgcggaagctgctgtccgagggcaacaccctgtccgaggccaagatcagcctgtacgagaagcacaagaacgacctgaagcggctcaagcaggtgatcaaggagcactgcccggacaagtaccgggaggtgttcaaggccaaggacaaggtggacaactaccccgcctacagcggccacgagagcgagaactaccggtgcaactacgagaagttccggctgttcctgaccaagaagatcttcaaggggctggagaacatccccgagatcacccagatcatctccgagctgaacctggagcggttcctgcccaagcagaccaccaaggagaactccaccatcccccaccagctgcacgagctggagctggaggcgatcctgaacaacgccgcccggtacatccccttcctgaacgagaagcggggcgacctgagcgtcaaggagcagatcatccagatgttcaagttcaggatcgactacttcgtggggcccctgaaccccaagagcgagaacgcctgggccgtgcaccggaacaccgagaagatcaccccctggaactacgacagcgtgatcgacctggacaagtccgccgagtacttcatccggaacatgaccgccaagtgctcctacctgggggaggacgtgctcccccagaacagcctgctgttcaccaagtaccacgtgctgaacagcatcaacaagatcaaggtgaacggctaccccatcagcgtggaggacaagcagaacatctaccggtacttcgagaaaaccgggaagaagatcagcccccggaccgtgcgggacttcctgctgtcctgcgggctgctgaaccagtccgacgagatcggcgggctggacgacgagctgaaggccgacctgaagatcttcaagacgatgcgggagatcctcggcgagaccttcgacgagaagatggccgagaacatcatcctgcatctgaccctgttcgccgagagccccaagcaggcccacagctggctgaagagcgcctacggcaagagcctgaccgaggaccagatcaagcagctgagccggctgcggatcaagggctggggccggctcagcagcgagttcctgaccaagatcgaggccgtggacgagcagaccggcgaggtgaccaacatcatcggggccctgtgggagaccaacaacaacctgatggagctgctgagcccccggtacgggttcagcaacgccatccagctgtacaagcaggagaagttcgggtcccagaagatgaccctgtcccagtacctggacgaggcctacgtgtcccccggcgtgaagcgctccatctaccagagcctggagatcgtggacgaggtgcagaaggtgatggggaaggtgcccccgaagaagatcttcgtggaggtgacccgcgaggagggggagaagcggcggaccaagagccgcaagaagaacctcgaggagctgtacaagtccctgtccagccccgaggtccaggccatccggagctacctggcccagtgcgacgagcagatgatccggaaggagaagctgtacctgtacttcctgcagctgggccggtgcatgtactccaacgagcgcatcgacatcgtggacctggagtccaagtacgacgtggaccacatctacccccagtccaaggtgaaggacgacagcctggacaacaaggtgctggtgcgccgggaggagaacggcaagaagggggacgtgtaccccctgctggacagcgtgcaggaccggatgaaggcccactggagctacctgctgcaggtgggcctgctgaccaagaagaagtacgagcggctcatccggcggacacccctgtccgacgaggagctggccgacttcatcgcccggcaggtggtggagaccagccagtccgccaaggtggtggccgacctgctgaagcggaagttcagcggcaagaccgacgtggtgtactgccgggcccgccacgtcaccgacttccggaaggaccaggtgatcgacaagaacggcgagcagaagcacatcgaccagtgcgtgcaccggaacttcgtgcgggagcaggaccccctgttcgtgaagaaccggctggtgaacgacctgcaccacgccaaggacgcctacctcaacatcgtggtgggcaacgtctacgacaccaagttcaccaagaaccccctgcactacatcaagcagcaggggctgaagttcacccggaacaagctgttcgtgaaggacatccccggggcctggatcgccaagggggacgagtccatcaacatcgtgcggagcatgatgcggaagaacaacgtgctgttcacccgcaagaccttcgagcggtccggggccttcttcgacgtgaccatcatgcccaagggcaaggggcagcggcagatcaaggcccacgacgcccggtacgacatcaagaagtacgggggctacaacaaggccaagggcgcctacttctgcttcgtgtcccacgaggagaagaagaagcggaagtactccatcgagaccgtgttcctgatgtacaagagcctgtacgagaaggaccccgtgcggtactgcgaggagatcctgggcctgtccagccccgtggtgctggtgcccaagatcaagatgaacaccctgttcagcatcgacggcgccctgctgcacctgagcggccggtccgaggaccggctgatcttcaacaacgccacccagctgtccatcgacccccagtggcacgtgtacatcaagcacctggagctgtgctccaagaacgacaccgtgaccaccagcagcaggatcgccagcgaccgcaacgagatcttcttcaaggtgctgctgcagaagctgaccaccaacgcctacagcaaggccctggagaccttcgccgagcggatggtgggcaccgagaagatcttcgcctccctgaccctggaggagcaggtgcagaccctgctgcagttcctgagcatcttcgcctgccgggccaccaccgtggacatcagctccctgcggatcaacgggaagagccccaagcagtcccggatccgcaggaacaacaccgtgaccgagagcaagcggttcgtgctgatcaaccagagcgtgaccgggctgttcgagaaggagctgagcctgaacgccctgatgaccaagaagagacccgccgccaccaagaaggccggccaggccaagaagaagaaggactacaaggacgacgacgacaagtga

SEQ ID NO: 288 - RNA, 4125 nt, synthetic construct
  source 1..4125: mol_type = other RNA
atggcccccaagaagaagaggaaggtgatgaagaagtactacatcgggctggacatcggcaccgacagcaccgggtgggccgccaccgacgagtcctacaacttcctgcggctgaagggcaagaccgccttcggcagccgcctgtaccccaaggccaacgactgcaaggagcggcgcaccttccggagcaaccggcgccggatgcagcgccggaagtaccggatccacctgctgaacgatctgttcgccgaggagctgaacaagatcgacaagaacttcctcatccgcctggagaactccaccttcaacttcgaggacaagaaggacaagacctccgtgcggaccctgctgttcaagaccttcgaggaggagaagaactacttcaagaactaccccaccatcttccacctgcggaagaagctgctggaggacgactccaccagcttcaacgacctgcggaacctgtacctggccatccaccacatcatcaagtaccgcgggaacttcctgaaggaggggaagctggactacagcgacttcaacaacgagctgctgatccggctgaacgagatcctcaagaccatctacctggaggagaacgaggaggacttcgacggcgacttcatcaactccaacgacaaggagaacttcaagaccatcctcctgaacaagaacctgaacaagaccaccaagaagaaggagctgaagaagctcttcaacgtgtcctccgagctgtgcctggcctacatcgatctgttcgtgagcctgatcaccggctccagctacagcctgaagaacctgaagctggagtccgacaacaagatctccttcgaggagaacttcgacgagaaggtcctggagttcgagcagctgctccaggacaagttcgagatcgtgcagatcgccaaggagatctacgactacgtgagcctgaacgacctgctgaaggacgagaagtgcctgagcaacgtgatggtgaacgtgtacgacgagcacaagaaggacctggcgctgctcaagaaggtgatcatcaacatcgacaagcagaagaacaacgaccacaacctgtacaacgagatcttcaagaacaccaacaacaagaacaactacagcagcctggtgaaggtgaacaccatcaccgacaaaaagaccagcatcaacgacttcaacaaggagctgctgaagatcatcaaggagaacaaggacttcatctgcgaggaggactacaactacctggtgaacaagctggagaacaacgagctgctcaagaccatcgccaacgtgagcaccggggtgatcccccaccagctgcacctgaacgagctggagatcatcctgaacaacgcgatcaagtactaccccttcatcgccaccatcaaggacaagatcatcgccatcttcaagttcagggtgccctactactacgggcccctggacgaccgcagcaacttcagcaacgtggtgcggttcaacaacaaccaggtgtacccctggaacatcaacgaggtgatcgacgacaaccagacccggcagaagttcatgcggcggctgaccaacaactgccgctacctgttcgactgcaaggtgatgcccaagtccagcctgctgtacgagaagttcctgatcctggaccggctgaacgccatggaggtgaacggcagcctgctgtcctacaaggagaaggaggaggtcttcaggtacatcatcagccggaacaagaccaccatcagcaacctgaagtcctacctgaagaagatctacaacctgaacgacgacatcaccatcaacaagatcagcctggaggtgcccttcgaggcccccagccacgccctgctgaaccagttcttcgacctggagaccgagaacgagaaggtggagaacctgatcttcctggccaccgtctacgccgacgacaagaacatcctcaagaccatcctggagaaggacatcagcctggacaagaagcagatcaacgccatcctgtccctgtccaccaagaagtgggcccccttctccaaggagctgctgagcggcatctactacatcgacgacctgggcgtggccagctccatcatcgacatcatggagaaggagaccaagaacttccaggtcgtgctgaacgacagcaagtacaacttccagaccatcatccacgacttcaacaaggagaagcggggcgagctgaccaacaaggaggtcatcgacgacctcctggccaacacccccgccatgttccggcggagcatcaaccagaccctgctgatcctggacgacatcgtgagcatcacccaccaggaccccgagaagatcttcatcgaggtcacccgggaggacctgaaggaggacaagaagaagcagtacgacaagcggcaggacgagctgaagaagttcctgacctccctgaagaacgacgtggacagcctgatgaagtcccagagcaagaagctgctggaggagctgaacgatgagaacatcatcaacaagctcaagatcaagagcaagcacgtgtacctgtacttcaagcagatgggcatcgacgtgtacaccggcaagatcatcgacctgtccgacgtcctgaacagcaacaagtacgacaccgaccacatcatcccccagtccaagatcaaggacgacagcctggacaacctggtgctggtggagcggacctacaaccagcggatcaagtccgacgcctaccccatccccgaggagatcaagacccccgagatcctcaagctgtggaagtacctgttcaagatcaaggccatcagcgagaagaagtacaacaacctgatccggaacaaggagctgaccctgcaggagatggaggacttcgtggcccgccagatcaacgtggtgaactacagcaacgtggtgctgcgggacgtgctgaacatcaagtaccccaacaccaagatcgtgttcagcaaggcccagtacgccagctacctgcggaaggagctgaagatcgccaagaaccggaacctgaacgacacccaccacgccgtggacagctacctgaacatcgtggccgggaacatcctgtccacgaccttcagcaacgtccgcacccgctacatcgagcggaacatcgaggagaaaaccttcaacatggagcgggtgctgaactacaacctgaagaagaacgacctggccaacatcgtgaagaacaactgcctgcggcacgacgccctggtgaccctgaagctggagtacaacaactccaacctgtacaagcagaccatctacaaggccaactcctccgactccctgatccccatccacaccaacaactgcatgaagaacaccgacaagtacgggggctacctgaagttcaccacccacagcctggccgtgatcagctacaagatcaagggcaaggagatcaagaagatcgaggccctgaagctgatgaacctgaagatgtacaagaacaacttcgacgagctgatcaagtccctggtgaccgagaaggacgccacggacatcaagctcatcaagttcatcggcctgaaccagaagatccaggccaacgggggcatctactacctgtactcctccaacgaggacaagaacaagtacaagatggcctaccagaactacatcgacaacgacctgctcctgtacttcaacttcgccttcaagaagatcgaccagctgtccgaggacaacaccatcctgcagcaggagatcatcaccaacaagtacgaggagcacaacttcatcatcaccaaggagaagaacaagatgatcttcgactccctgatcaacaacagcttcaacaaggtgtacgacagctgcaactacatcgtgaagctgcggaacctgaaggacgacaactccttcaacgacttcagcctgaagaagcagatcgaggtgatcaaccagctgatcatctacatgagccgcaacagcgacagctccaacctgaagaactacttcagcaacctgagcaacgcccggatgctgctgagcaagaacatcaccaagaacaacatctacctgatccacgagtcccccaccgggctgtacaagtacaagaagctgctgaagagacccgccgccaccaagaaggccggccaggccaagaagaagaaggactacaaggacgacgacgacaagtga

SEQ ID NO: 289 - DNA, 5052 bp, synthetic construct
  source 1..5052: mol_type = other DNA
atggcccccaagaagaagaggaaggtgatgcccaaccggctggtgatcagccccatcagcatcgacctggggagcaagaactccggggtgtacttcgcccactaccaggccgggagcttcctgggggagatcgagaaggagggcaaggtctaccagctggagaaggacaacttcaccctgatgatggtggaccggaccgcccgccggcaccagcggcggggctacaagcgccgccggctggtgaagcggctgttccggctgatctggtgccaggagttcggcctggagtgggacgacaagacccagcaggccatcgggttcctgttcaaccggcggggcttctccttcctgaccgaggagtacgacaccgaggccctgaagtgcttccccaaggacgccttcaacgagctgcccaagaagatccagaaggagatcgtggagatcggcgacacctgcaacctggacgagaagatgtccgagtggaagcagctggggcagcccgagatcaccaagatcttcgccaccgtggacgaggagtccaaggtgatcaaccggaagctgctgatgatcggccggaccaacctgctgaaggagtgctgcaagaagcgcatcgacggcaagcagatcgagaagaacaagcgcaaccagaagcagtactccctcagccagtggatcttcgacgagtgggacgacatgggcatcgtggggctgcacagcatccgggagaagggcaactccgtggacctggccgagaagctgaaccagcagaacagctccgtggccagcgagatcctgcacagcatccccaacgacctggacaaggagaaggccgagctgaacgccagcccctggaacttcaacagcaagaagttcaacctggagaagtccagcttcgagcggaagatcgtgagcggcaactccgcccggatcaagaacaagaacctgcaggccaagaagaagtggatccggacccacctgcaccacttcaccttcgccctgcacaccgtggtgcaggagctgagcaccggcgcccggcaccggagcaagtacttccaggagatcaacgacgtcctggagtgcgtgagccacgagcacgggtgcctgaacaccttctgcaacaagctgcagaccggggagacccggatccggaacggcaccagcctgacccccgagtccctggccaacctgatcggcaacatgagcaacctggagctgaagcccctgcggaagtacttcaacgacaagcggcacaagcagggggacttctgggaccggaaccggctgaagaagctgttcgggaactggatcctgcgggagtggcgggtgaaccccgagaaggacctgaacaaggcccaggacgccgagttcgactaccagaccctgcggagcaactggaaggtgcaccagggctccgtggtggacttctggctggagcagagccccagcttcaccatccctccctaccaggacaacaacaaccggcggccacccaagtgccagtccctgatcctgaacaccaagttcctggacaacaactaccggaactggcgcacctggctgaaggagctgctgttcctgcccgaggtgaacgagtacctgggcaactacaagaaggagatggaggagctgaagtccggcaagggcaccgcctacttccggggcgagctgaccaacaagccccagctcgactccgggcggcggaccgccaaggacctggacgcccggatcctgcagttcctgctggaccgggtgaaggacgaggacgtcctgaagctgaacgagatctacagccacaccaagaagttccgccaggagcagacctcccccgaggaccgggggaaggcccgggacaagctggagaaggccatcaactcctccggcctgtccgcggacctcaagacgccccggaactacaagtaccgggccgtcttcgccgagggctccttcatgcacctggtgtgcaactactacaagaaccggcagaaggcccggaagggccggatcttcatccaccccgagtaccggttcgtgaaggggcggggcttcgagaacaccggccggttcgacgaccgggaccacctgctgacctactgcaaccacaagccccggcagaagcggtaccagctgatcagcgacatcgccgggctgctgcagctgcccagccagcagctgaaggagcggaccaactccaacaacgacgaggacctgaccgagtggctgaagaacaacttcaagggcctcaagaccaactgcgcggacgccgccaaggcccagaagaagttccgcggccacctgaaggagaagatccgcgaggtgtgggacgggtccaacagccaggacaagctgttccggctggccaagaagtgcgtggccctgtgcgaggtgatcgggtcccggctgttcgacgacgaggcccagcggcagaagtggatccagaccctggaggaccggcccgccaacgccgtgttcctgctggcccagatcaacaacatcgccttcaaggagcggcggggcaacgcccggacctgcagcgtctgctccctggacaacagccagcggatgcagaccttcaagaacaacgtgaaggcccagcggctgccctccatccccacccggctgatcgacggcgccgtgatgcggctggcccgcatcctgggcggggccatcgccaaggacaagtgggcccggatcgagaaggacctgctgctgggcaccgaggtgcggatccccatcatcaccgagtccaaccggttccagttcgagcccaacctgctcgagctgaagcggccctacctggacgccaaggagtacaacaagcggaagcgggagctggacagctccctggactccagcaacctgaagaagatccagagctccaagaagagccggatcaaggggtccgcccagctgagcccctacagcggggtggagctgggcaacaccggggacatcgaccacatcatcccccgggcccaccccaagtgggggaccctgaacgacgaggccaacctcatcttcaccaacgagcaggacaaccgggtggtgaaggggaactccgagttcagcctgagcgacctgcacccctcctacaagaaccacgtcttcggcaccgccgacgactcccagatcgagaagatcatcaaggaggagatcggcaacgggcagggcggccagttcaacttcggccgctacttcaacttcatcgagctgaccgagcggcagcagaaggccttccggcacgccctgttcctgatcggcgacccgctgcggaagctggtgatcaacacgatcaaccaccgcacccggaccctggtgaacggcacccagcggtacttcgccgaggtgctggccaacaccctgtacaagaaggccaagcggatcaacaagcaccacctgctgtccttcgactacttcggggtggaggcccaggacaactcccggggcgacgggatccacaacctgcgccacgacctggtgacccactaccgggaggacctggacagctacagcaagagcgacagcagcccccagaagccctacagccacctgctggacgcccaggtggccttctgcatgatcgccgacgcccaccgggggtccggcgggctgcggctggagctggggaacaccgggatctggtcccgggtggaccagatgacccgggaggtggagaccaagaagtcccgggtccacgacgacagcctgttcaaggccatccaggtgaacccccggaacttccggaagatcagcctggagcggcggaagcccaaccaccagtacttcaagcaccggtccatccaccgggacgggatgtacgccgagcactacctgcccatcctgatccaccggaagctgttcgaggtgcggatcggcttcgactggaagaacagcttccagctgaagaacacccggcagtcccgcaagaagctgtacttcgccctgaagttcaaccccaagaccaagctgctggccctgaacgaggacgacagcttcgagcggctggagttccagctggcccagatcgggttcaactccaagatggactacttctgcatcagcctgaacacccagatgatccacagccactacatcgagcactacaacagctccgagggctaccaggactacagccccgagatgaacttcctgcggaacaccctgagctaccgcaccgagcggaagcggatcaccaagctcaacgacgccaagatcatcctgggcaacgagaagaacttcaagctgcccaaggaccagagctacctgatcctgcccgtgcggaacgagtgggccaagctgatcgacgcctgggagaactcccccgagagcgagaacggggagttcctcagcaagttcttcagccccaagcaccagcacccgcacaagaagttccggcaggactacagcctgcccatcaagagcagcggcgggcaccgcctgctgaagcggaagagctggaacaaccggcccatcttccagatcgtgaacgacagcgacagccggaccaccggcgccaaggccttcatccccgtgtgcaacagcgagggggagatcggcaagctgctgtccgagtccgccaagagccggaacaccttcttcctgaagaaggagaagtactacttcgagctgagcgacaccgtgaagctgatcgacaccgacaagtggcaccaggtggagctcagcgaggacctgaccaagctggggctgaccgagctgaagtaccagatcgacaacaacacccggcccggcatccgggtgaagttcgatcagctgctggcccgcggcaaggtggacgagatcttccagcacagcctgctgaagccccgctacctgaacaagctcaaggaggagttccagaccaacctgaactccaacgagctggagagcctggagtacaccgccttcgggttctccaaggacgtgaagcggtccctgcggaaggtgctgcagcagtactacttcggggagtccgacaagaacaagagacccgccgccaccaagaaggccggccaggccaagaagaagaaggactacaaggacgacgacgacaagtga

SEQ ID NO: 290 - DNA, 4380 bp, synthetic construct
  source 1..4380: mol_type = other DNA
atggcccccaagaagaagaggaaggtgatgtcccacagcgacgtgatccccagccagagcctgctgagcagctgcctggctctggacctgggggccaagcacaccggggccttcctggtggtgcgggacgcctaccgccccgccaccagcagcgactgccacgccatgaccctggtgctgcccgacgacggggacaagatgacctacagcgcccaggcccggcgggccgtgcggcaccggctgcgcaacaagaagcggcacaacctggcccgccggctggccctgctgctgatcccccagaagatcaaggaggccagcatcacgctggactccaccgaggagcagaagctgatcgaggccatctgctccctgctgaagcggcggggctacagccggctggagagcgacagcgccaccgacctgaccagcctggagaacctggaccccgccgtgttcgccaaccacagcgagctggggcagttcttctgcgacgccgccgacatccccagccagtgggagaacctgacccaggacctgcagcagatcagcgccttcctgaacaagaagcccaccgacaaggccttcaagacctacttcagcaagaacttccccgacctgaagtcccagtccaaggcctactccaacgccctgaaggtgctgagcgacgacgccaacctgctgctgcagcaggtcaggttcggccaccggcaccggaagcagtacctggaggagatccaccaggacatgcggcacgacagccggctgaccaaggccgtgcaggccttcggggacctggaccggctgtggcgcctgatcgggaacctgtccaacctgcagctgcgggccatgcggtggtacttcaacgcccccgagctgttcgaggacaggttctggatgcccgagcggctgcagaaaaccctgatccgcgccttcaagtacttccactgcgagaagggcgcggagtcgcagaaccagcggcagctgatcaagaccctggagagcaccaccgacgtgttcgaggcgctgtgcaccatcgaccccgagcggaccatccccgtgtacgaggaccagaacaaccgccggcccccggtggacgagaccctgctgctgagcccccacaagctgaccgagaagttcggcaccatctggaaaacctgggccgacagcctgatcaagaaggacccggccctggaggagaacctggacctgatcctcgcctacacggaccggcggtcccggatcgccatcgccagcaacccccagcggtacagccccctggactaccggttcagctacgtgctgcagcgggccctggaccggtccaagaagctggaccggtacgccctgcggctgctggccaccgacgcccagagccagctggcccacaccgcccgggccgagctgtgccgggtgatcgggagccagcacgtggacgccttcatcgagatggccaagatgtactacgccgagaccgccgacgcccgggtggggctgtggatcgacgggcaggccaacctgctggagaagtccaacatccacccgcccatgaagaagcgggtgctgaaccagctggtgggggacgtgttcggcctggacgccgacttcggccgggccttcatcgagaactactggaactgcaagctggccgagaagagccggtccagcatgcggtccacctgccagttcatcgagaccgtgcggaagcagttcggcggggagttcaacctgctgttcaagagcaagacctccaccacgaaggacatcacgtccgtgaaggaccgcatcgaggacgtgaaggacttcctgaagaacaagctgcagctgagcgagcggaccatcgagcgggtggccaaccccttcagcctgtcccagctgtacaccctgatcgagctggaccggaccggcttcgccagcaccaccgtggccgtgcagctggagaacagctggcgcatgagcaccagcgacgggcagaacgcccagtgcagccggctgcccgccgactgcgtgcggcccttcgacggggtgctgcggaagctgctggaccggcaggcctacgagctggccaagtacaccttcgacgcctggaagaagaacgtgaagcacgacggcaccaccatccaccacgccaccgtggtggaggagaacaagttcgccttcacggccagcctggccaccctgaagaagaacaccgccgccaagaagaaggccaccgacgccctgcagcggcaggaggcgcggtggctgtccaaggacgagcggatcaaggaggccagccagaacatctgcgcctacaccggcgtggccctggacagctgcatctgcgagtacgaccacatcatcccccggaccctgaccaagagcgtgctgtccaccgccttcaacagcgaggccaacctgatctgcgtgagccaggccggcaaccagcagaagaaggacgcccggtaccggctgaccaacctgcacagcaagtacctggccgccatcttcggcaccaccgactgcaaggccatcgccgacaagatcgagaaccggatcgaggagctgaagcgcaaccggcggctgcggcacttcgagctgctgaacgccgaggaccaggcctacgtgcggcacgccctgttcctcgacgacggcagcgaggcccggaagtgcgtgctgagcgagctggccgccagcaaccggtccaaggtgaacggcacccaggcctggttcatccgctgctacctggagaagctgacccagctgagccgggactggctgaacaagcaccaccacaccctgatctgccaggccatgcggacctccaccgacgccacccggaagttccgcaaggccctggcccaggccgacgcggtgttcaccaaggaggtgatccagcccgtcgccagccacagcgtggacgccatgtgcgcctacgccgccgcctgcgtgtccgacgggttctgctacttcacccagtccgacaagcagctggcggacttcacccaggtggacctgctgaaaaccctgcacccccagacctgcaccgtgaactgggtgaccagcctgcccctggaggagaagaagaaccacgacagcaagcccctcttcaaggaggggatcctgtccgagaagttcctgcccatcatcacccaccagggcaagatcttcatcgggttcaccctgccccagaaaaccacccccaacagcgagaacgccatcctggtgcagggcgaggaccccacctacctgctgcggatcctggccccctacctgaacaacgacgtgaacgtcaacaacagcagcttctgcacctaccacatcaacaagcaccgggccttcgagctgttcagcaaggccgtgctgaacaagagcctgctgaccaaggaggagcaggaggccaccaacatcctggagggcctgcggtacgtgaccgagcggatccccgtgctgaaggggctgatcaaccagtccgggaaggccctgatccaggcccccagcgagttcaacaagagctacttcaacatctccttcaagatcacccacaccctgttcggggcctccgggaccctgatcctgcccgccaaggccgactggctgaagctgttcaagcaccccgacctgaaggacctcttcgggaaggacctggtgaccctggaggacatcgacctggagaactgcttccaggtgatccaccggatgaacgccagcaagctggcccacaccagcgtgaagcggatcccctccctgcccatcgtgcggaaggccagcgggggcttccgcatccggcggcagacgctgtcccacgaccacgtgtaccagctgtacaactacgagaccgccacctccggggagttcgcctgcaacgacaacggcagcgtgaactggaagaagcccatcctgttcgaccacctggtgaacaacaacgtcacccccttcgacagcaagcccaaccccaagcccgtcaagaccgtgaagatgcgcgacttccggcgcatctccgaggacaacgacatgctggtggacatcgcccccgccagcatcgaccggcggatcatccggatcacgatgaacttcgacaagctgaagaactggctgacagtggccaaggccgactgtcagcccatccaccccctggacctgcccgtgaacatcaagctgaaggagccccagctgttcatccccaaggacctgagcaccgcccggttcctggggatcccccgggacgggaagatccagttcaagcagatcggcagccgggtgaccttctggtacaccgtgcggaacagcacggacttcatgaaccaggccttcaacaacgctgcccgcaagagacccgccgccaccaagaaggccggccaggccaagaagaagaaggactacaaggacgacgacgacaagtga

SEQ ID NO: 291 - DNA, 4221 bp, synthetic construct
  source 1..4221: mol_type = other DNA
atggcccccaagaagaagaggaaggtgatgaaggagtactacctgggcctggacgtggggaccaactccctgggctgggccgtgaccgacagcgagtacaacctgctgcgggtgaaggggaagatcctgttcggggtgcgcttcttcaaggagggcatctccgccgccgaccggcgggtgaaccgctccaaccggcggcggacccagcgcaagaacctgcggctggacctgctgcgggagatcttcgaggaggagctgaacaagaaggaccccctgttcctgaagcggctcgacgagagccgctactgggaggaggacaagaaggtggactccaagaacagcctgttcaacgacgagaactacaaggacaaggactacttcaaggacttccccaccatcttccacctgcggaacaacctgatgggggagaaccggaagaaggacatccggctgtacttcctggccatcaaccagatgatgaagcggcggggccacttcctcatcgatggcaacctgaaggacgtgaacgacgtgagcgggtacaaggagcggatcgagtacctgctcaacgaggagttcgacctggacggggaggacatcctggagaaggagttcttcgacaagatcttcgaggtgatcctgaacaagaaggagaacaagaccaccaagaagaaccagatcaaggagatcaccctgtcctacatcagcgacaagaccaagaagaagaagatggaggagttctggaacctgatcatcagcggcaagaactccgtcaagaacctgttcgacgacgagaacatcctgaaggagctggaggagaccaacaaggagaaggtggagatcgtgttcttcaccaccgacttcgaggacaaccacgagtacttcgagaacctgctgggcgagaagatcgagatcatcgacaccctgaaggccatctacgacttcgtgatcctgcagggcgtgctgaacggcgccaagaccctgtccgaggcccaggtgaagcgcttcaacgagcacaagaagcagctggaggagctgaagaagctcgtcctgaagtacaacccctccaaggagatctacaaccggatcttcaaggagaagaacaaggacctgcacaactacgtgtcctacatcggggtgtacaaggggaagaaggagaaggagaccatcaagaagatctccgccgacgacttctacaagttcctgaagaagcagttcaaggagctgtgctccgactacgagtccaacgaggacttcaaggagatcctgaacgagatcgacaagagcaactacctgctcaagcagatcgtgagcaccaactccaccatcccctaccagatccacctgatcgagctggagaagatcctggagaacctggagaaggacttcccctacttcaccaacatctccgacgggatcaagttcagcgagaagatcaagctgatcttcaccttccggatcccctactacgtgggccccctgaacaacgccaagggggagaacagctggatcgtgaagaaggaggggatgaagaacaagaagatccggccctggaacttcagcaagatcgtggacgagcacgagtgcgaggaggccttcatcaagcggatgatcaacatctgcacctacctgcccaacgagaaggtgctgcccaagtcctccctgctgtactccgagtacatggtgttcaacgagttcaacaacctgaagttcaacggcgagaagctgtccgccgagctgaagaacgagatcatcgagaacgtgtacaagcggtacaagaaggtgaccatcaagaagatccgggactacctgatcaccaacaactacgccaccaaggacatcgagatcaccgggtacaacggggacctgcacgccaacctggccagctacatcgacttcgagaacatcttcgggaacaacttcgaccgggacatggtcgaggacatcatcgagcagatcaccatccacgtgggcaacaagaagctgctgtccaagaagatcgccgagaagtaccccaacatcaccgagcagcagctggagaagatcgtgaacaagaagtacaccgggtgggcctccttcagcaaggagttcctctccaacctgaagggggtgtccctggagaccggggagcagaacacgatcatcggcttcctgaagagccagaacgacaacctgatgcagctgctgtcccagaactacaccttcatggaggacatcgacaagctgaacaaggagtcccgcagcgacaagctgtcctacgacgtgatcaaggagctgtacgtgtcccccgccgtgaagaagatgatctggcaggtgctgaagttcatcaccgagatcaagaagatcatgggcggcgagcccaagaagctgttcatcgagatggcccgggccgacgaggagaagaacaagcagaccaactcccggaagaaggagctggagaacctgtacaacgggctctccaaggacgacaagacctactggaacaaccagatcaaggagaaggaggagtactacttccggcggaacgccgtgtacctgtactacaagcagctgggcaagtgcatgtactccggggaccccatcgacctggaggacatcctgtccggcaagggggacttcgacatcgaccacatcatcccccggcacctcaagaccgacaacagcgtgcagaacaacctggtgctggtgaagcgcaacctgaaccagaccaccaagaaggagcagtaccccatcccctccatcatccggaacaacgagaaggtcaagaagctgtgggagttcctccgcagcaagaacttcatctccgccaccaagtacgaccggctggtccggaaggaggagctgaccgacgaggagctcggcgggttcatcgcccgccagctggtggagacccgccagtccaccaaggtgatcaaggacctggtgtccatgtacttcgagaacaccaccgtgatccccgtgaaggccgacctggccaactccctgcggaaggacctgtccttcgccaagtgcagggagctgaacgacttccaccacgcccacgacgcctacctgaacatcgtggccggggacgtgtggaacaagaagttcaccatcaaccccatcaacttcatcaaggagatcaacaaggaggggaaccggaaccggaagtactccctgtacgagttcttcaaggagaagcagttctccaagaaccgcggggagaagaacaagatctgggaccccgacatcgccaagaagaagatcaacaaggtgctgaacacctacaccctgctgttcaccaacgacacctacgagcagcggggcgagatctccgacgtgaacatcgtggggaagaagcagatcaagaaggggaccaagtacctggccatcaagaaggacgaccggctgaaggacgtgtccaagtacggcgggtacaacaagatcaagggcacctacttcttcctggtggagcacaaggagaagggcaagctgatccggaccatcgagtccctgcccctgcacaagaaggtggagatcaagaacatcgccgacctgcagaacttcgccgagaacgagctgaagctgatcgagcccaccatcatcatctccaagatccccaccaagaccgagctggagatcaacggcttccgctacctgctgaacggcaagaccgacaaccggctgtccatccagccgttcatgcagatgttctgggacaccaccgagatgtacgagatcgggaagctgttcaagaagtactcctacaacaccaagaccaagaaggccgaggacgagaacggggagaacaaggagaaggagatcttcgactcctccgacaaggagaacatcaagaagtacctgaagatcctgatcgagcggctccacaaggagccgttcaagaaccggatcaacatccccgagctgaacatcaacgaggagatggactccatcaagatgttcgagctgttcaaggagatcctgaacctgtcccggcgcaccctggagagcgtgaacctgacctccatcgggggcgaaaagacccagggcaagacccggatcaacaagaagctgaaccacaacgacagcatcaagatcatcctgaagtccctgaccggggtgtacgagaagaaggtggacctgaacaagtgcctgggcgagcagctgaagagacccgccgccaccaagaaggccggccaggccaagaagaagaaggactacaaggacgacgacgacaagtga

SEQ ID NO: 292 - DNA, 4293 bp, synthetic construct
  source 1..4293: mol_type = other DNA
atggcccccaagaagaagaggaaggtgatggagtccaagaactactacatcggcctggacatcgggaccgacagcatcggctacgccgccgccgacgagtcctaccggctgctgaagtacaagggggagcccgtgtggggctcccacatcatcgaggaggccaacctcaagaccgagcggcggcagcaccggaccgagcggcggcggctggaccggcgccagcagcgcgtgaccctgatccgggagatcttcgccaaggagatcgccaagatcgaccccgacttctacaagcgggaggaggagtccgcgctgctggccgaggacgtgagcacctccaaggggctgttcacggacatcgggtacaccgacaagaagtaccacaagtcctaccccaccatccaccacctcatcaacgagctgatgacggacgccgccccgcacgacgtgcggctggtgtacctggcctgcgcctggctggtggcccaccggggccacttcctgagcgaggtgagcctggacaacgtggagtccgtggtggacttcaagacggtgtacgacaacctgaccgactacttcgccttcgagatcggctgcgagcccgcctgggacaacgccgatcccgacgagatcgagaagatcctggtgaagaagatcaagtccaccagcaagatcaacgagctgaacaacctgctgttcgggaagaagaagcccgagaccgagatcaccgacgccttcccgttcagcaggcccggcatcatcaagctgctgtgcgggaaggactgcagcgccaaggacctgttcggcaaggaggagtacgccgagatcaagtccctgaagctggacgacgacgagctggactccaacctgtccgagctcggcgacgacgccgagctggtgctgcggctgaaggccgtgtacgactgcgtgaccctgcacgacgtgctgggcgagaacaagttcatctccgccgccaaggtggaggcctacgagcagcacaagcgggacctggccgggctgaagaagttcatcaagaagtacgcccccgagaagtacaacgagatcttccggaaggtggacaagtccaccgccaactactccgcctacagcggcaacatcaagtccgacaagaacaccaaggccgactggaagaaggccacccccgagaacttctgcacctacatcctgaagatcgtgaacaacatcaccccggccgccgaggacaaggccttcttcgacgacatggtggcccgcctgcagaaggacgtgaacaccttcatgcccaagcaggtgaacggcgacaaccgggtgatcccctaccagctgtactacgtggagctgaagaagatcctggagaacgccgagaagtacctgcccttcctgtccgagacggacgaggaggggtacctgaccaaggacaagatcctgtccgtgttcaccttccggatcccctactacgtggggcccctgaacgccagcagcccctacgcctggatcaagcggaaggccgggcggatcacgccctggaacttctccgagatggtggacgggaacgagtccgagcagggcttcatcaacaagctgatcggggtgtgctcctacctgccgggcgagaaggtcctgcccaagcagtccctgctgtaccagcggttcaccgtgctgaacgagatcaacaacatcaccatcaacgggctgcggatctcccccgagatcaagcagctgatctacaacgacgtgttcaagaagaacaagaaggtgtccgtgaagaagatcaaggactccctgcggcagaacaaccacagcaaggacgacgtggagacgatcgccgggatcgacatctccatcaagtcctccctgtccagctacatcagcttccggcggctgctggagagcgggaccctgaacgagaccgacgtggagaagatcatcaaggtgtccacctacatggagtcccgcccccggttcaaggcctggctggagggggagtaccccaacctgagcgacaacgacgtgaagtacatcacgtccctgaagttcaaggacttcggccggctgtccgagaagttcctgtgcgccatcctgggcagccggaagaacaacgagaaggaggacaacggggaggccagctccatcatcgacgccctgtggaacaccaacaagaacctgatggagctgctgtccgacgactacacctactccgacgccatcaagcggtactccgacaactactacatggccaacggggtgaagtccctggacgagcgcatggacgacatgtacctgagcaacgccgtgcgccggcccatctaccgggtgctggacatcgtgtccgacatcgtgaaggccgaggggaaggcccccaacaagatcttcgtggagatggcccggggcgccaagcccgacgagaagggcaagcgcaccaccagccggtgcggcatgctgaaggccctgtacaagaccatcgacaccgatgacgtgcggcgcctggagcaggagctggagaagatgggcgacgaggccaactcccggctccagtccgagaagctgttcctgtacttcctgcagctggggaagtgcatgtacagcggcgaggagatcgacctgaacaacctgatggggaagcggtacgacatcgaccacatctacccccgcagcaaggtgaaggacgactccctgttcaacaacaaggtgctggtgaagtccaagatcaacggctccaaggacaacaactaccccctgccggagaacatccgggagaacatgtccggcatgtggaagaagctgctggacgggggcctgatcaccgaggagaagtaccggcgcctgacccggaaaaccgggttcaccgacgacgaggcctggggcttcatcaaccgccagatggtggagacccggcagtccaccaaggcggtggccaccctgctgaaggagtactaccccaacaccgagatcgtgtacgtgaaggccgggctggtgtccgagttccggcacgagaagaagctgtggaaggccatcctgcccgaggaggagcggtacctggacgactcccagatcgagccctggaaaaccgagctgtggaagtcccggaccgtgaacgacctgcaccacgccaaggacgcctacctgaacatcgtggccggcaacgtgtaccacgagaagtgcaccaagccctggtacctgtccaacaaggacaactacagcatcaacctgatctccctgtactccctgaccccctacatggtgggggagcgcaagatctgggacggggtgaactccctggagaccgtgtggaaaacggtgcacaagaacgccgtgcactacacgatctaccccttcagccggaagggcggcctcttcgaccagaaccccctgaagaagaacgccgacctgatcccccggaagaaggacctgcccgccgagaagtacggcgggtacaactcccccagcgtgaacttcttcgtgctggtgaagtactacttcgacaagaacagcgacgtgatgttcatgccggtggagctgtccgtggccgagaagtacatgtccgacctgaacttccggctgtcctacagccagaagcagctgggcaagatcctgaacaaggacaagaaggccgacaagaagctgaagatcagccgggtggagttccccctgggcaaccggatcatcaagatcaacacgatgatcgagctggacgggtaccgcatgtgcatcacggccaacagctccggcggcgccgagatcaaggtcagctccatgacgcccctgtgcctcgcccccgagtgggagttctacatcaagaagctggagaccttcgacgagaagaagaacaacaaccccaacatgatctacatggagaagtacgacgtggtgagcccggagaagaacgtcgagctgtacgacatcctgatcgacaagctgagcaacaccgtgttcaagaagcggccggtgaacccctgcgacgacctggccgacggcaaggccaagttcgccgcccaggacgtgttcaagcagaccaagtgtctgctgcagatcgtgggcatcttcggccgcatcaacaacgggttcgacctgcgggccgtgggcggcggccagtacgccgccaagagccggcggtccaccaacctgtccaactggaagaagtactactccgacgtgcggatcatcgacaccaccgcctccgggctgttcgagcaccggtcctgcaacctgctggacctgctgaagagacccgccgccaccaagaaggccggccaggccaagaagaagaaggactacaaggacgacgacgacaagtga

SEQ ID NO: 293 - DNA, 4104 bp, synthetic construct
  source 1..4104: mol_type = other DNA
atggcccccaagaagaagaggaaggtgatgaagcagaacggcaacaacgagaagatcaaggagtactacgtggggctggacgtgggcaccaacagctgcggctgggccgtgaccgaccccgagtacaacgtgctccgcttcaagggcaagtccatgtggggcgcccggctgttcgacgaggcccagaccgccgccgggcggcggaccgcccggaccgcccggcggcggctggcccgccggcggttccgcctggacctgctggagtccttcttcgagaaggagatcaccaacatcgaccccctgttcttccggcggctgaagaacagcaacctgtacgaggacgagatcaaggccgagaccggggcctacagcctgttcaacgacaaggggtacaccgaccgggagtacctgaaggagtaccccaccatctaccacctgcggagcgagctgatccactccaccaagccgcacgacgtgcggctggtgttcctggccctgcaccacctgctgaagaagcggggccacttcctgtacgacaccggggacaacgacaacttcaagaacatcgacaccgccctggacgacctccagcagtacctggacgagaacgggatcccgttcgagatccagaacaaggaggagttcaagcgggccctgatgtcccggatcaagctctccgagaagaagaagaagctgaaggaggtctacggctccatcatcgacgccgaggagagcgacatcgatgtggccgagctgatcgacagcctgagcggggccgtgatcaagctgagcaagctgttctgcgacgagaccctgaaggagaccgagatcaactccctgtccctgggcgacgacctggacgagaagtacgacgccctgtccgccgccctggcggagcggctggacctgatcctgctgctgaagaacatcttcgacagcgcccggctgtccatcctgctggacaacaagaactacatctgcgacgccaagaaggccctgtacgagaagaacaagaacgacctgaagctcctgaagagctacatccggcggaccaacaagtccgcctaccgcaaggccttctaccccaaggaaaagaccaacaacttcgccgcctacacccggtacaagaccgagtaccagtgcaaccaggaggacttcctgaagttcctggagaaggagtacttcaaggagaaggaggagctcctgacccccgaggagaaccggatgtacgaggagatcaaggccgggaccttcctgaccaagctgaaggggtccgagaacggcctgatcccctaccagctggcctacaaggaggtgaagaagatcctggagaacgcctccgcctacctgcccttcctgaaggaggcccaggccgacggcctgaccaccgccgagaagatcgagcggaccttcaccttccggatcccctactacgtggggcccctgaacaagaaggccaagcactccttcatcgccaggaccgacgagaagatctacccctggaacttcgagcgggtggtggacctggacgccagcgccggcaacttcatggcctcgctcatcggccggtgcacctacaccaacgagcccgtgctgcccctgaacagcctgctgtacagccagttcgccgtgctgaacgagatcaaccggatctccgtgaacgacgaggtgatcccggtggagatcaagcaggccatctaccaggacctgttcgtgaagtccggccggaacgtcaccaagaagcagatcttccgctacctgaagcagcgcgggctcatcagcgacgccgacaagctgtccggcatcgacgacaacgtgaaggccaagctgaagagcctgcacgacttccagagcatcctggagaacggcctgaccaaggacaaccgggagatggtcgaggagatcatcgaggccgtgctggtgtacagcgacgacaagaagatgctgcggcggtggctggagaagaacatcaaggagctctccgacgaggagatcaagaagatctgccggctgaactaccgcggctgggggcggttctccaagaccttcctgcagaacatctaccacgtggacaagaacggggaggcccacagcatcatcgacatgctgtgggagaccaacgagaacctgatgcggctgatgagcgacgcctacagcttccagcagaagtgcatgaactacaagaaggagcacttcgacagcggggagtccatccggaagcagctggacgacctgtacatcgcccccagcgtgcgccggagcatctggcagaccctgcgggtggtggacgaggtcgtggacatccagaagggcgcccccgccaagatcatgatcgagatggcccgccccagcaagaaggacaccaagaagcagcggaccatctcccggaaggagaagctgatcgccctgtacaaggcctgcgacgagcagaaggacgagctgttcgaccggctgaaccaggagaccgacgagtccctgcggcgggacaagctgtacctgtactacacccagttcgggaagtgcatgtacagcggggagaagatcgacctgaccgaggccatgaaggacgacgagacctacgacatcgaccacatcttcccccggtcccgcatcgtggacgactccatcgacaaccgggtgctggtcaagagcaagctgaaccgggacaagtccaacgtgtaccccatcgccgaggagatccggcagaagatgcagcccttctgggaggtgctgcacagcaagaagctgatgagcgacaccaagtacaaccggctcatccgccacaccccgctgaccgacgaggagctgtccagcttcatcacccgccagctggtggagaccaaccagtccaccaaggccctggccaccctcctgcagcagctgtaccccaacaccaagatcatctacagcaaggccaagaacgtgtccaacttccggcggaagtacaaggaccacgggctgatcaagagccgggagatcaacgacctgcaccacgccaaggacgcctacctgaacatcgtggtggggaacaccttcgccaccaagttcaccgaccggttcttcatgcacatccacgagaacgccgccaagaacagctactccctgaccaagatcttcgaccacgacaccaagggcgcctggaagtccgacgggacctccctcaagaccgtggagaagtacatgaacaagaacaaccccatcgtgaccttcgccagcatctgcgtgaagggggagctgtacgaccagcagccccggcccaaggccaagaaggacgggagcctgttccccctgaagaaggggaagcccgtggagaagtacgggggctacaagaaccccacagggtcctacttctacatcgtggagcacacgaaggggaagaaaaccctgaccacgatcctgcccgtgtacctgtacaacgtggtggagtacgagcgggaccccatcgcctactcctgccagatgcacggcctggtgaaccccaagatcatcgtgaagaagctgcccaagaactccatgctggagttcgacgggatccggctgctgatcaccggccggaccggcagcaacaacgtgtacatgcacaactaccagttcgccgtggacaagacccacgtggagtacatccacaacatcgagaagtacgtgacccggtacgagaccaagaagccgcccgtggtggtgagcgtgtacgacaagatcagcaccaagggcaacatcgacctgtacgactggctgtgcgagcggatgcggatgaacccctacaagcagctgttcaaggggctgctgaaggacctggaggccgggcacgagaagttcaacgcgctggacgtgctggcccagtgcaagatcatcctggagatcctgaagagcttcaagtgcgaccggcagatcaccaacatcaaggagctgaacggcaagggcaccgccgggatcctgaagaaggcctccaacatcagctccttcaacaaggtgaacgtgatcgtgcagtccgtgaccgggctgtacgagtacaagcggaagatcctggggaagagacccgccgccaccaagaaggccggccaggccaagaagaagaaggactacaaggacgacgacgacaagtga

SEQ ID NO: 294 - DNA, 4155 bp, synthetic construct
  source 1..4155: mol_type = other DNA
atggcccccaagaagaagaggaaggtgatgggcaagtactacctgggcctggacatggggaccaactccatcggctgggccgtgaccgacgagaactacaacctgatccggaagaagggcaaggacctgtggggcgtgcggctgttccccgaggccaagaccgcccaggagcggcggtccaagcgctgcgagcggcggcgccggcagcgcgagaaggcccggatcggctgcctgcaggagatgttcgccgacgccatcaacgagaaggaccccggcttctaccagcggctggaggacagccggttcctgatcgaggacaagcgcgagcaccagcccttcgtgctgttcgccgaccgggacttcaccgacaaggactactacgccaagtaccccaccatctaccacctgcggaaggagctgctgcagtccaaggagccccacgacgtccggctggtgtacctggccgtgctgaacatgtacaagcaccggggccacttcctgaacaccaccctgaccggcggggactccaccgacgagttcgagtccctgtacaagtccctggtggagaagatgggccgggtgcgcgaggaggagggcgtggacgacttcctgtgcgtggacctgaagaacgtgctgaccgacaagcggttctccaagtcccgcaaggtggaggtcatccgcgaggtcctgaagatcgacaagaaggacaagatcaagaccgacatgtggaagctcatctgcggcctgcaggtggccctggccaacatcttccccgaggagtccatgtccgacgagttcaagaagtacaagctgtccttcgacgacagcgggtgcgaggagaagatgctggaggtggaggggatgatcagcgaggaggccttcgacgccctgctgatcatgaagcagatccacgactgcatcatcctggccgacatcatggccggcgggaacaagaagtaccacttcctgtccgaggcccgggtggccagctacgagaagcacaagaaggacctgaagctgctgaagaagatctacaaggtctacctgcccgagaagtacgacgagatgttccgcaagaccgagaaggacaactactgcgcctacatcggcagcagcaacgtgaacgggaaggtgcggcggcggaacgagcactgcaagatcgaggagctctacgcccggatcaagaaggagaccgggtccatcgccgccaacagcgacgtggcctacatcctggaggagatcgagaagggcaccttcctgctgaagcagatgaccgccctgaacggggtgatccccaaccagatccaccgggccgagctggagcagatcctgaagaacgccgccgagtacctgcccttcctgaacgagaccgacaaggacgggatgaccgtgagcgacaagatcatcgccctgttcaagttccagatcccgtactacatcgggcccctgatcaagaccgagaagaacaacgcctgggtggtgcggaaggaggacgggaaggtctacccctggaacctggagcagaagatcgacgtgaagatgaccgccgaggagttcatcgggcggatggtgaaccactgcacctacctcagcggcgagaaggtcctgcccaagaacagcctgctgtacgagcgcttcatggtgctgaacgagctgaacaacctgaagatcaacgggcagaagatcagcgccgagctgaagcaggagctgtacaaggagctgttcgggaacgggaagaaggtgaccggcaagcggatcaagacctacctgttctcccacgggtacgtgtccagcgacatgcccgtggagatcaccgggatcgacggcgactgcatcaaccggctgagcaactacaagaagttcctggaggtgttcaagaccgagaccctgacctacgagcaggagaagatcgccgaggacatcatcctgtgggggaccctgtacggcgactccaagcacttctggaaggagaagatcgaggagaagtacggggagatcctgacccccgagcagaagaagcggatcctgggctaccggttccgcgactggagccggctgtcccgggagttcctctgcctggagggcgagtccaagcagaccggcgagaccgcctccatcatcagccggctgtggaacgagaactacaacctgatgcagctgctgggcgacgagttcacctacaagaacgtgatcgaggagcgcaccaaccagatcaacaaggtgctctccgagatccagtacgaggacctgatggagctgtacatcagcgcccccgtgcgccggatgacctggcagaccatcctgatcctgaaggagctgcagaaggtgctgggccggtaccccgacaagatcttcgtggagatggcccgggagcaccggaaggagtccggccggaccgtgtccaagaagcgcaagttcgaggagctgtacaagaagtgcggcgaggaggccgagcagtggctgcgggagatcgaggtgaccgacgagtaccggttccggagcaagaagctctacctgtactacacccagaagggccggtgcatgtacaccggcgagcggatcgagctgagcgagctgttcaacgacaaccggtacgacatcgaccacatctacccccggcacttcgtgaaggacgacaacatcgacaacaacctggtgctggtgaagaaggagaagaacgcccacaagtccgactccttccccatcgagtccgggatccagaagaaccagctgacctggtggaacctgctgctggagggcgggttcatcaccaaggagaagtacaaccggctgacccggaaggaggagttcaccatcgaggagcagaccgccttcatcagccggcagatcgtggagacccggcagggcaccaagaccatcgtggacgtgctgaagaagtcctgccccgagaccgacatcgtgtacgtgaaggccgggaacgtgtccgacttccggaaccacttccacgtgatcaagtgccggagcatcaacgacttccaccacgcccacgacgcctacctgaacgtggtggtgggcaacgtgtacgacgtgaagttcacccggagccccaagaacttcgtggaggcctaccggcgggaccccgtgcacaacccctaccacatggacaagatcttcgacttcaacgtgaagcgggggtccgtgaccgcctgggacaccaagaagtccatccggaccgtgcggtccgtgctggacaagaacagccccctggtgacctacatgaactacgaggtgcacggggagctggccgaccagaacccctacagcgcctccaaggccgccaaggtccagggggaggggtacatccccctcaagaccagcgactcccggctggccaacgtgcagtgctacgggggcttcaccaagtacaccggcacgtacttcttcgtggtggagcacaccgtgaagaagaaaaccgtgcggaccctggaggccatgcccctgtacctgaaggccaacatgaacaagatcgacgagatcgagaagtactgccggaaccagctgaagtacatcgagccccagatcgtctgcagccggatcaagatgtacagcctgatgaagatcgacggctactacgcctacatctccggccgcaccggcaaccagatcctgctggtgaacgccatccagctggtgctgaagcgggagtaccaggactacatcaagaagctggacgacatcttcgagaagggcctggacaactccgccctggagtaccagaaaaccatcaccaaggagaagaaccaggagctctaccgggagctcctgtacaagcacaaggatggcatctacggccggaagcccaaccccgtgggcgagaagctggagaagggcaaggccgtgttcaagaacctgagcatcatggagcaggccacgatgctgcgggagatcctgaagctgagccagcgcctgaacgagggcgccaacctggccctgttcggcgagggcaagaagtgcgggatcaccaagatgaacaaggagatcaccggcctgaaggagtgcaaggtgatccaccagtccgtcaccgggctgtacgtcaccgagaccgacctgctcaacatcaagagacccgccgccaccaagaaggccggccaggccaagaagaagaaggactacaaggacgacgacgacaagtga

SEQ ID NO: 295 - DNA, 4101 bp, synthetic construct
  source 1..4101: mol_type = other DNA
atggcccccaagaagaagaggaaggtgatggccaagaaggactactccatcggcctggacatcggcaccagctccgtgggctgggccgtgatcgactgccagaactacaaggtgctgcgcaagggcaaccagaagctctggggcgtgcgcctgttcgacgaggccaccaccgccgagacccggcggctggcccggggcacccgccggcggtacgaccgccggcggacccggatcaagctcctgcaggaggagttccagaacgagatcaacaaggtggactccaacttcttcaagaagctgaaggagtccgcctaccacgaggacgacaagctgaacaagaccatcatcctctcccaggaggagaagaacaagatcaagaagtacaacgacctgtaccccaccatctaccacctgcggcacaagctgatctcctccgaggagaagatggacatccggctggtgtacctcgccatccaccacatcatcaagtaccggggcaacttcctgtacggcgcctccaacttcaacaccctgaacctgaacatggaggagctgttcgacaacctgctgaaggacctgaacgagatcacgtccatcgaaaagaccgaggacctgagcctcgtgaacgccaagaagctggaggagttcctgtccctggagtccaagaacgacaagaagctggagctgaccaaggagttctcccaggccatctccaagaagcagaccgccgagctggtgaagctgctgatcggggacaagtccaacctgaacgtgctgttcaacaccgagtccgaggaggagatcaaggtgtccttcaagggctcggagtacgaggacaacgaggacaagatcatcaagaacttccccaacgagatcgacatcatcgaggacgtgaagaacatctacaacgcccagttcctgctgaacctgttcaaggggcggaaggagcagaacctgtcctacgtgatggtggacaactacaacatccacaagaaggacctgcagaccctgaagcagatctacaaggccgacaagaacctctacaagaagatgttcaagaacgagaactgcatctacgagaagtacatcaccaacaacatgacctacgacgacttcaagaaggagatcatcaagtccctggagatcctgaaccccatcaacaaggaggacctgctggagaagctggagaaggagaacttcatgccccggatcaccagcgtggacaacggcaagtacccctaccagctgaacgagtccgagctgatcgagatcatcaagaaccaggggcagtactaccccttcctgctggacaagaccgaggacgagaagtacaagctggtgaagatcctggagttccggatcccctactacgtggggcccctgaacaacaccaccagcaagaagggggtggagaacaagaactcctggctggtgaagaagaaggacaacgtgaagatcaccccctacaacttcaacgaggtgatcgacctcgagtccagcgccgagaagttcatcaagcgcatgctgggcacctgcacctacctgctgaaggagcccagcatgcccaacaacagcatcctgtacagcaagttcaaggtgctgaacgagctgaagcagatcaaggtgggcgacgagaacaaggagcagaagctgtcccgggagatgatcaacaagatctacaacgacctgttcctgaccaccaagggctccatcaccgacaagaagttcaaggagtacctgatgcagaccggggagtacacgatgtactccaacctgtctgtgaccgggtactccgcggacaagaagatcgccaacaacatgtccagctacctggacttcttcggcgagaacggcatcttcaccaacaccaactacagcgtggaggacgccgagaagatcatcgagtacatcaccatcttcgaggacaaggagatcctgaagcgcaaggtgatcaacgagttccccacgctgaacgaggagcagatcaagaagatctgccgcctcaagtacaaggggtggagcaacctgagcaagaagctgctgaccgaggtgtactacatcgacgagaaaacctcggtgcccaagaacatcatcaccctgatggaggagacctcccagaacttcatgcagatcatcaccgacaagaagtacaacttcgaggagaagatcaacgagatcaacaactccaagaacagcaagaagctgtcctacgagctggtggacgagctggccaccagccccaagaacaagcggggcatctaccaggccctgaaggtgctgaacgagatcatccagtacatgggctacgagcccaagcggatcaccctggagatggcccgcggggaggaggagaacaagcggaccgtggaccgcaagaaggtgatcgagaacgcctacgccggcaacagcgaggagatctacaactactccaagctgaagaaggagctgggggagatcgagaagatcgagtcccacaaccagaagctgttcctgtacttcctgcaggaggggaagtccctgtacagcgggacccctctgaacatcgaggagctggagaagtacgagatcgaccacatcatcccccggaccctgatcaaggacaactccatcgacaacctggccctggtgacccgggaggagaaccagaacaagagcgccagcttcgtgctgcccgagaactaccggaccagcaagatgaaggtgtggtggaaccacctgaagaagctgaagctgatctcggacaagaagtacaacaacctgatccgggacaagttcagccaggagaccatcgaggggttcatcaaccggcagctggtggagacccgccagatctgcaagcacgtggccaacatcatcaagaacatgtacgaaaagaccgagatctactacatcccggccaacctgtccagcaactaccgggagaagttcgagctgtacaagttccgggagatcaacgactaccaccacgcccacgacgcctacctggccgccaccctgggcgagtaccggacctacctgaagtccaacatctcctacgactacctgaagcggatcaacttcaagtcgtaccaggagaagaagtaccaggagctgaacgccgggtacgtgatcaacagcctggtgaacgccgacaactacaccgagctgttctgcgaccccaacaccggcgagctcctgttcgacgccaaggagttcaacaaggccatcgagaacaccctgtaccagaacgacatcctggtgtccaagaaggtggagttcaagaccggggagctgtggcagcagaccaagaacaagaagggcgagaagggcgtgcccctgaagcggaacatgcccaccgagaagtacggcgcctacacctccatcagccccgcctacgccgccgtggtgaagttcgtgaagaacaacaaggaggaccagcggatgatcggcatccccatctacatcgacatcaccagcaaggagaacaagaacatcaagatcgagtacatcaagaacctgctgaacgccgatgaggtggagatcatcaaggacaagatccccttctactccaagctgaactggaacggggccatctgctccctggtgggggccaccgacaaggtggaggtgtgcaacgccaaggagttcaacatcgacaagaagcacatgatcaagtggaagctgaccctggtgcggctgttcaacggcaagaaggagatcatcgacaacgccacctacaacgagaacctcgaggagatcatcgagtacatcgtgtccaagatcgagaaggagtacatcctgtaccagaacctgctggaccagatgaaggagatgttcaagatcaactccaccgagaagctgaaccccgaggacaaggagaaggtgatcctcgagatgttcaagctgctcaagtgcaacagcgcctgcgccaacttcaagttcctgaacgagagcatcgccttcgggaagaagaacgggcgcatcatcaacgacggcatcatcatcaaccagagcgccaccggcctctgggagaactactacgagttcaagagacccgccgccaccaagaaggccggccaggccaagaagaagaaggactacaaggacgacgacgacaagtga

SEQ ID NO: 296 - DNA, 4242 bp, synthetic construct
  source 1..4242: mol_type = other DNA
atggcccccaagaagaagaggaaggtgatgaacctgcggaacaccaagaactacaacatcgggctggacctggggaccagctcggtggggtgggccgtgaccgacgacaccggcgccctgctgcacttcaagggccgccccacctggggcagccggctgttcagcgagggcaagaccgccagcgagacccggatcgcccggggccagcgccggcggtacgaccgccggcggcagcggctggacctgctgcagaccttcttctacgacgagatggagaagatcgacagcgagttcttcctgcggctgcggcaggcccggctgttccccgaggaccgggaccccagccacgccgactaccgctggcccctgttcaacgagagcaacttcaccgagaaggactactacaagcggttccccaccatctaccacctgcggaagcacctgatggagtccgacgagaaggccgacatccggctgatctacctggccttccacaacatcgtgaaggtgcggggcaacttcctgcaccaggacaaccccaacctgtccgccaagaacgccaacatgaaggccagcatcgaccggctgtccgaggtgctccgcgcctggtacgatgagcgggaggtggcctgcgagttcacgccccgggacatcctggccatcctggaggaccaggccgccgacagcttccggagcgtgaagcgggacgccctgaagaacgccttcaccttcgacggcgaccacggcaagatcgccagcgagctggggaaggccttcgtgggctacaaggccgacttcgcctccatcttcctgctggagagcgagaaggcctccttcagcctgtccaacgacgaggccgtggacgagttcatcagcagccagtgccccgacgagggcgccgacctgttcgaggccctgcgggccgtgcacagcgccttcgtgctgagcggcatcctgcggggcgggaacggggagaccatctccttctgcaaggtgaacgactacgagcggtacggcaacgacctgaagctgctgaagcagctgacccgggagtacgcccccgagaagtacgcccggttcttctgcggcacccactacgacgcccccttccacaagaactacgacgcctcccaggccgaggggtacaccaagtacaacctcggccagaagaagagcgagtacaagagctcctccatgacctacgacgacttcaagaaggccgtggagaagctcttcaaggggacccccgccgagtccgacgaccggtacaaggagatgatgcaggggttcgacgaggggaccttcctgcggcggctcaagacctccgacaacggcagcatcccctaccagctgcacctggaggagatgaccgccatcatcgccaagcaggcccctcactaccccttcctggccgagaaccagcagaagatcgagtccctggtgtccttccgcatcccctactacgtggggcccctgaccaccaagaacgccgccgtggacgggaaccagaacctgcggttcgcctgggccaagcggctgcccggcaaggagggggagcggatccggccctggaactgggaccagatcatcgaccgcaccgagagcgcccagcgcttcatcgagcggatgacggggacctgcacctacctgcacggggagcccgtgctccccaagtgcagcctgctgtacgagaagttctgcgtgctgaacgagctgaacggcagccggtggtcccaggacggggacgacgagaagcggttcagcgccgacgaccggtccaagatcttcgagctgttcaagcacggcagcgtgagctacgagaaggtgcagggctggctgcggcagaacaaccgcctgaacccccacgtgatgggcgggcagggggagaccaagtacgagagcaagctcagcagccacatgttcttctgccggctgctgaacgtggacgacctggacgccacggccagcgccatggcggaggagatcatcctgtggaacaccctgttcgaggaccgcaagatcctgaaggagcggatcgagcagacctacgggggccagctgaacagcgcccagatcaaggccatctgcaagaagcggttcaccggctggggccggctgagcaagaagctgctgtgcgagctgaaggtgcccaccgactccgggctgaagtccatcatggacatcctggaggaggggaacccctccaacgggcacctggggcgcgccatggtgctgatggaggtgctgcgggacgaccggctgaagttcgagcaggccatcgacgccgccaacaaggaggccctgcagagcgggggcgggctgaaggtggaggacctgcccggctcccccgctctgcggcggaccatcaaccaggcggtgcgggtggtggaggagatcgcctccatcaccaagaaggtgcccgccaacatcttcatcgaggtgacccgcgaggacgacgggaagaagaagggcaagcgcaccacccggcgctacgacaccatcaagcaggccctgaagagcctgcgcgccgagggggaggacaagcccgagatcctgtccgagctgggccggcggaagccggacgagctggacgagaagctgaccctgtacttcatgcagaacggcaagagcctgtacagcggcgagcccctgcggatcgagtgcctgtccgagtaccaggtggaccacatcatcccccagtcctactacaaggacgacagcttcgagaacaaggccctggtgctgcccggggagaaccagcggaagtccaacgccctgctggtggagcagtccatccggacccggatggagcccttctggcggaccctgcggaaccacgagctgatcggggagaagaagtaccgcaacctgatgcgggaccgggtggacgagaaccagatgaagggcttcatcaaccggcagctcgtggagacctcccagatcgtgaagttcacccagatgatcctgtccgaccggttccccgagaccaagatcatccccgtgaaggccgccctgagcagccaggtgcggtccgcctgcgggttcgtgaagtgccgggaggccaacgactaccaccacgcccacgacgcctacctggcctgcgagatcggccggttcatccagctgcggcaccccgacatctacgacaaccccatcgcctacacccggatgatgcgggacttcgtgcgcgcccgctccgaggagctgaagcggaccggccggatgcccggggacgccaccttcctggtgcagagcttcctgcggtccgggttcaaccgggagaccggggagatcttcaaggacgcctgggacgccgaggccgagatcgcccggatccggcggttcctgaactacaaggactgctacatctcccggatgcccgagatccacaccggcgccttctgggggcagaccatctacagcccccacagcaacgagaccaagctgctgtccctgaagaaggggctgaacaccgagaagtacggcggctacagcaacaaggccttcgcctacttcttcatctacagcggcgtgaagggccggagcaagaagtacgccatcgccgggctgcccatctacctggccaagaccgtggccgaggacgagggcaacctgctgcagtacgcccaggccctgggcgccgagaaggaggtgtccgacatcgagatcgtggccagccccatcctgtacaaccaggtggtgcggtaccagaaggacgagttccggatcagcgccgaggacgtggtgtactccaaccggcagctgttcctgcccaccgcctacagcaagcacctggccgccctcggggacaacgccatctccgagggcgacggcccgctgtacgacgagctgtacagcgtgatcatcgacaagatggacgtgctgtgcaccaggttcgagcggatcaagcagaccctggtgaacggcaagaacgagttcctgaacttcgaggtgtccgagaagaaggagttcatcaagcagctgtgcgccttctgcaacggcggcaccgagcgccggaagaaggcgcgcatcaacatcagccggttcgggggcagccccaacgccggcgggatgggcaacgggttcatcctgagctccatcagcgagctcgagatcatcgaccagtccgtcaccgggatgttcgagtcccggcggcggctggagctcaagagacccgccgccaccaagaaggccggccaggccaagaagaagaaggactacaaggacgacgacgacaagtga

SEQ ID NO: 297 - DNA, 4173 bp, synthetic construct
  source 1..4173: mol_type = other DNA
atggcccccaagaagaagaggaaggtggtgaacatgaacagcaccgactactacatcgggctggactgcggcacctccagcgtgggcttcgccgtgaccgacgtggactacagcatcctgaagttcaacggcaaggccatgtgggggagccacctgttcgaggaggccaagaccgcccaggagcggcggggcgcccgctgcgcccgccggcggctgcagcggcggaagcagcggaccgccctgctgcaggagatcttcgccgaggagatctacaaggtggaccccaccttcttcatccggctgaacgactcccagtacctggaggaggacaagcggatccccgggcggaacatcatcttcaacgacaaggacttcaaggacaaggactacttccggaagtaccccaccgcctaccacctccgcaagaccctgatggaggagaaggtggcggacccccggctgctgtacctggggatcaaccacatcctcaagcaccgggggcacttcctgttccccggggacaacctgaaggccgtgtccgacatcagccccgtgctggacagcatcgccgaggcctacaacgacatcttcggcgagcagctgtccttctcctccaacgaggacatcgagaaggccctgctgaacaagtccagcatctccaagaaggaggggctggagtcgggcatcagcctgcacgacaccaagaagaaggccctgctggtcaaggccatcctggggtacaacaccaagccccaccagctgttcgacaacgaggagtacaaggagtgccccgccatcgagttcaagaagctgtccttcgaggagaaggacctccccgagatcgaggagaccgtgagcgacgacgagtacaagctgatcctgaacctgaaggccctgttcgactggggcctcctggcccggatcatgcagggcaacaagtccatctccgaggccaaggtctgcctcttcgagaagaacaaggacgacctgaagatcctgaaggaggccatcaagacctacgccaagtccgagtacgacgacttcttccacagcatggacaacgggaagttcagcagctacatcgggaagaaccacgacaagcggaaggggaaggaggggcgctgcaagaagagcagcgtggacgacttctacaagaccgtgaagaagatcctggggaacgcccccaaggaggacgccggggtgaagcacgtgctgaactccatcgaggaggacagcttcctgcccctgctgtcctcctaccggaacggcgtgatcccctaccaggtgaacaaggccgagctggagtccatcctggacaacgccagcaagtacttcgacttcctgagccggaaggacgaggacgggctgagcccccgggacaagatcctgtccatcctgacctaccgcatcccctacttcgtggggcccctgggcagcaacgccgacagcgacgcccacgggtggctggtgcggaaggagaagatcggcaggatcctgccctggaacatcgagcagaaggtggactacgaggagtccgccgagcgcttcatcaagcgcatgaccaacaagtgcacctactgcaagaccgaggacgtgctgcccaagaacagcctgtcctacagcaagttcatggtgctgaacgagctgaacaacgtgcgcctgaacggcgagcgcctgtccgtggagcgcaagcagtccgtgttcaacgagctgttcaagaagcgcaagaaggtgaccaagaagcaggtggtgaaccacgccatcaaggaggggtggtacggcaaggacgacctgtccgtggacgggatcaccggcatcgacgaggacttcaaggcctccctgggcccctacgccgacttccgctcctggatcgagcagggcaagctgaaggccgacgacgtcgacgagatcatcaagtggatcaccatcttcagcgagggcggcgacatcctgaagaacaggatcaagaagttctacggcgatgtgctgaacgacaacgacatcaacgccatcaccaagctgaagtacgccgggtgggggcggttcagccacaagtttctgtacgagatccagggcatgaacaaggagaccggggagctgatgagcatcatgcggatgctctggcacacccagcacaacctgatggagctgctggggaacgactacgagttcatcgagcaggtggacaagccccagatcctggggaagctggactacgacgtggtggacgacctccacgtctcccccgccgtgaagcggcagatctggcagaccctgcggatcgtggacgagctgcggcggatcatgaagcacgacccccgcaaggtgttcatcgaggtgacgcggtccgagcaggagaagaagcggaccgtgtcccggaagaaggacctgatcgacaagctgaaggaggccgagaagggcggcctcggcttcggcatcgaggtccagaagctgatctccagcctggagggcaaggacgagagcgccgtgtcccgccaggacaagctgtacctgtactacagccagtgcggcaagtgcatgtacaccaacgagcccatcgacctggacgacctgtacaacaccgagctgtacgacgtggaccacatctacccgtacagcaagaccgacgacgacagcctgaagaaccgggtgctggtgctgaagaaggccaacctgcgcaagagcgacagctaccccatcgacgacagcatccgccacaagatggccagcttctggaagatgctgtccgacaaggggttcatccccaaggagaagtacgagcgcctgatccgcaccagccccctgtccgaggaggagatgaagggcttcatcaaccgccagctggtggagaccagccagaacgtgaaggccaccgccgccatcctgaagagcttcttcggggaggggaccaagatcgtgtacagcaaggccgggaaggtgagcgacttccgggaccagttcgacctggtgaagtgccggtccctgaacgagctgcaccacgccaaggacgcctacctgaacatcgtggtgggcaacgtgctggacaccaagtacacctccgagttctacaagcacgccgacgggcggggctacggcaacgtggcccggcccttcgacttcgacgtgaagggcgcctggctgcggggcagcgggggcaccatcgccaaggtgcgggacatcctgaacaagaacaacatcctgttcacccggcagcccgtggcccgcaccggcgccctgttcgacctgcagatcgtgcccaagggctccaagaagggggccctgcccgtgaagccctccgagccccggctgaaggagaagctgcaggggctggacgacgccacgggcatctacgacgagtggacctccaagtacgggggctacaacagcatgtccaccagctacttcgccctggtgaagcacgccgacaagaagcggagctacgccagcttcgtgcccatcgccatgatcgacgccaagcggctgagcgagcccgagcagctgctggcccactgccgcaacgtgctgcggctggagaaccccgtgatcgtgaacccccggctgctgatgaacacgcagctggagatcgatgggtaccggttcagcatcaccgggaagagcagcgggggcaaggtgatcaccctggtgtccagcatcccgctgatcatctcccaggagtcccagaaaaccctgaagaagatcgagaagttcttcaaccggaagaagatctacaaggacatcgagatcgactccaagcgggacgggatcaccgaggacaacgccgccgccctgtaccaggagctggtgaacaagtccagctacggcatctacaacaagaagccgagcaaccagtccgacctgctcaagaactcctacgaggtgttcgagagcctcgggctgctgaacaagtgcaacgtgatcaacgagctggtgaactacttcgccatgggggtcggcaaggccgacctgaccctgatcaacggcaccaaggcctgcggcgtgctgaccaagggcgccatgatcgacctgggcaagaccgacctgtgcatcatctaccagagcatcaccgggctgttcgagacccgggagcagatcaaggccaagagacccgccgccaccaagaaggccggccaggccaagaagaagaaggactacaaggacgacgacgacaagtga

SEQ ID NO: 298 - DNA, 4221 bp, synthetic construct
  source 1..4221: mol_type = other DNA
atggcccccaagaagaagaggaaggtgatggagaaggaggactacttcctggggctggacctggggaccagctccgtgggctgggccgtgaccgacacccagtaccacctgaagcgcgccaagggcaaggacctgtggggcgtgcgcctcttcaacgaggcctccaccgccgccgagcggcggatcaagcggaccagccggcggcggatcgagcgggagaaggcccgcaaggccgtgctgaaggacttcttcgccgacgccatcaacgaggtggacgccggcttctacctgcggatggaggagtccttcctgaagttcaacgagaagcggaacgaccgctccgagggcaaccagcagcccttctccctgttcaacgacaaggacttcaccgacaaggacttctacgagaagtacaagaccatcttccacctgcggaaggagctgctgcacagcatcgagccgcacgacgtgcggctggtcttcctggccatctacaacatgttcggccaccgcgggcacttcctgaactccacgctcgatcccaccaagagcgagtccaagatcgacatcgcctaccaggagatggtggaggccctgaagctggtcaacgtgaacatcctggagagcatcgactacgacaagttcgagaagatcctctccgggcgcgggaagtcccgctcccgcatctgcgaggagctgggggacttcttcgccatcgagaagaaggacaaggtgcgctacagcatcctgaagatgctgagcggcctgaaggtccccgtgaaggagttctacaacaacaacaacgaggacctggacgaggagtcccagaagaagtccgtcagcttccgcgaggagaacttcgaggagaccttcgacgagatccacaccatcgtgggcgacgagtggttcaacgccctggagaacatcaagaccgtgcacgacatcggcatgatcgccaacatcatgcacgggcacatcttcctgtccgacgcccgcgtggagatctacgagaagcaccagcaggacctgaagcagctgaagagcctgctgaaggagtacaacatgaagggctacgagtccttcttccggaccatcgacaagggcaactacagcgcctacgtcgggtccgtgtactcccacggcaagctgctgcggcggaaggccgacggccgcaagaaggaggacctgtacaagaccatcaagggcctgatcaaggggatccccgacgacaacgccgacaagaaggacatcctggagaagatcgacagcgagtccttcctggagaagcagctgaccggcagcaacggcgtgatccccaaccaggtgcacagccgggagctgcggcagatcctgaagaacgccgagagctacctggacttcctgaagaacaaggacgagaagggcctctccatctccgacaagatcatccagctgttcgagttccagatcccctactacgtggggcccctgggcatggagttcaacggcaagaagggctacaactgctgggccgtgcccaaggagaaggacaagaagatcggcaagatctacccctggaacttctacgagaagatcgacgaggccgccagccgcaaggagttcatcgagcggatggtgcgcaagtgcacctacctgaacgacaaggtgaccctgcccaagaagtccctgctgtacgagaagttcatggtgctgaacgagatcaacaccatcaaggtgaacggcaagcggctgaccaccgagctgaagcagggcatcttcaaggagctgttcgggaagggcaagaaggtgtccaagaagcgcatcaaggagtacctggtgagccggaacgccatggaggagaagtgggagatcgaggggatcgacaaggactgcaaccagtccctgacctccatcggcaagttctacggggtgttcggcgaggaggtgtacaacgacgacaacaaggccctgatcgaggacatcatctactggggcaccctgttctccggcgacaagaagttcatcaagagcaagatcgaggagaactacggcaaccggctgaacgaggagcagctgaagcgcatcctgggcttcaagttcgagggctggggcaagctgtcccgggacttcctcgagctgcagggcatctccaaggagaccggggaggtgaacagcatcatcaacttcctctgggagaaccaggtgaacctgatggagctgctcagcgacgagtacaccttcaccgacgagctgaacaagaagatcatcagctccgagaagcccctgtgccagtggaagatcgaggacctggacgacatgtacatctccgcccccgtgaagcggatgatctggcagacgatgaagatcgtggacgagctgcagaccgtgctgggctacccgcccaagcggatcttcgtggagatgacccgctccgacgaggagaaggtgcggaccgtgtcccggaaggagaagctggccaagctctacaagaagatcgaggaggagcagtccgtgtggaacaaggagctggagctgaaggacgagtcctacttcaagtcccgcaagctgtacctgtactacctgcagatggggaagtgcatgtacagcggcgagcccatcgacctgagccagctgatgaacgacaacatctacgacctggaccacatctacccccagcactacaccaaggacgactccctggagaacaacatggtgctggtgaccaaggaggagaacatgaagaagggcgacaagcccatcccccgggaggtccaggacaagatgtacaagttctggctggagctgaaggacaaggagttcatcaccgacgagaagttctcccggctgacccggcggaacaaggagttcacccgggaggagaaggtgggcttcatcaaccgccagatcgtggagaccggccaggccaccaaggtgatcacccagatcctgcagcagtccatgggggacgagtgcaagatcgtgttcagcaaggcccggctggtgtccgacttccggaagaagttcaagatccccaagagccggatcatcaacgatctgcaccacgccaacgacgcctacctgaacatcgtggtgggcaacgcctactacgtgaagttcaccaacaaccccatgaacttcatcaagcagagcgagaagaaccccgactccgaggagtacaagtaccacttcgggcggttcttcgagcaggacgtgaagaacaagaacgagaccgcctggatcgccaaggactccgggtgcaccatcgtgaccgtgaaggacaccctgcggcggaacaccccgctggtgacctacaaggtcgaggaggggcacggccagtacttcaaggagacggtctacggcaccgacaaggccaaggccaacagctacatcggcatcaagaccaaggacagccccctgaacgacgtggccgagtacggcggcaagaccgacgtggccaccctggggtactgcctggtggagtaccggaagaagaacaagatcatccggaccctggaggagctgcccgtgttcctgggcgagtcccgctccctgaaggacgagaacgtcctgaactacctgcgggagaagttcatcaaggagggcaaccccgaggccgccgagagcctgaacctgatcgagcggttcatccccaagcagagcctgatcaagcgggagggctactactactacctgggcggccggaccaacgtgcaggtgtacctgtacaacgccatgcagctgaagctgcccctgaacctggtgaagtacatcaagaagatcgagaaggccaactccaagtccgactactccgagatcgacaaccagggggagcccgtgatcaccgtggagaagaaccaggagctgtacaagatcctgatgtccaagttcaaggaggacccctacaagaaccgggtgaacccgatcaacaaggtgctggagaacggcctgaacaccttcatggacatcgagatcgccaaccagtgcaagatcatcgaggtgatcatcctgaacatctccaagagcaacacgatgaacctgaagggcatcggggaggcctccagcgccggcatgtgcctggggtccatggacatctccaagctgaaggagttcaagatcatccaccagtccgtgaccgggctgttcgagatcgagaaggacctcctgaagaagagacccgccgccaccaagaaggccggccaggccaagaagaagaaggactacaaggacgacgacgacaagtga

SEQ ID NO: 299 - DNA, 3411 bp, synthetic construct
  source 1..3411: mol_type = other DNA
atggcccccaagaagaagaggaaggtgatggagatccgcttcgccctggacatcggggtggccagcgtgggctgggccgtggtgaacgacacctacgaggtgctggaggccggcgccaacatcttcccctgcgccgactccagcaagaacgccgaccgccggggcttccgccagctgaagcggatccaccggcggaagcacacccggatccgggacttcgagatcctgtgggagcggcaggggtggaacatggagaagatcatcatctccgaggtgctgcccctgcgggtgaagggcctgaaggaggagctctccgagaacgagctgtacaacgtgctgcggaacgagctcctccaccgggggatctcctacctggaggacgccatcgacgacaccgtctccgggagcctgtacgagaaggccatcaagaacaaccagcggcagctggagaaggagagcttcccctgcgtgatccagtgggagcggctgaagaagtacgggaagtaccggggcaaccagtccgtgaacatcgagggcaaggagatcaacctgtccaacgtgttcaccaccgcctcctacgagaaggagatcgagaagatcctgaacacgcagaagaagttccactccatcctgtccgacgagttctgccagcagtacatcgacatcttccgccggaagcggaagtactacgagggccccgggaaggagaactcccggaccgactacgggatctacaccacccagaaggaccagaacaccggggagtacctgacctacaacaacctgttcgagcggctgatcggcaagtgctccgtgtaccccgaggagtaccgggccgccggggccagctacaccgcccaggagttcaacctgctgaacgacctgaacaacctgaccgtgaacaaccggaagctgatcaagaaggagaaggaggagatcgtggaggccatcaagacctccaaccggatcgacgtgaagaagatcatcgagaacgccatccacgagaagatcgactccctgaccggcatgctgctcgacgacaagggcaaggagtgcatgcacaagttcgagcagtacaacctggtgcggcggaacttcgagaagaacggcctggacttcgagaagatcacccgcaccgaccacgacctgatcggggagatcctgaccctgaacagcgactacggctccatcctggagtccatccgggacaagttcccggacctgtccgagaaggaggtgaaggtgctgtacgagatcaagcggaagaacggctccctgttcagcaagtggcagaagctgagcctgaaggccatgaacgagctgatccccgacatgtacgacgagtccaagaaccagatggtgctgctgaccgagcggaagctgatcaagaccaaccggaagcagtgcatggagtccaagtacatcaactgcaacatcgccgtggcccagatctacaaccccgtggtggtgcggagcatccgcatcgccgtgcggatcgtgaacgccctgctgaagaagtacggcaaccccaagcagatcatcgtggagatgccccgggacaagaacgacgacgagcagcggaagaagctggacgacatgcgcaaggccaacgagcgggagctgaacgccatcatcaaggagatcaaggagcagtacggggagaacatcagcgacgagaacttctactaccagaaggagctggccctcaagctcaagctgtggcgcgagcaggacgagaagtgcgtgtactccggcaagcagatctccatcaaggacctgctgtacaacccccagctgttccagatcgaccacatcatcccgatctccatcagcttcgacgacagccggaacaacaaggtgctggtgtacgacatcgagaaccagaagaaggggaacaagaccccctacatgtacctgtcccagctgtcccggcactgggacttcgagcagttcaaggcctacgtgaaggagctgtacgcccggaagaagatccagcggaagaagctggagaacctgctgtacatgcaggacgtcaccaagtacgacgtcctgaagaagttcatcaaccggaacatcaacgacacccggtacgccagccgggtgatcctgaacctgctgcaggactacttcaacgcctaccagatcagcaccaccgtgcgcgtgatccgggggtccttcacccaccagatgcgcaaggtgctgcggatcgagaaggaccgggaggagtcctacgaccaccacgccatcgacgccatcctgatgtgctacagccagatggggtacgacctgttctacaagaagcagtccgagttcatcgactgggagaccggggagatcgtggacgagctggcctgggacaagctgatggacagcgagaagtaccaggagatcatgtaccagagcaagtacatgaagctgcggaagaacatcgccgagggcaaggagaagatcaagtactggcacaaggtggacaccaagcccaaccgcagcctgtgcaaccagaccatccggggcacccggaagcgggagggcaaggtgtggaagatcaacaagctgaacatctacgaccagaacgacgtcaagaccctgcggaacaagatcgagaagggcaagtcctccaccttcctgatgtaccagtacgaccgcaagtcctgggaccagatgatcgagatcctggacctgtaccgggactccaagacccccttctccgactacgagaaggagaccggcgacttcttccgcaagtacagcaagtcccacaacggccccgtgatcaccaagatcaagtaccaggacggggagctggggagctgcatcgacatcagccacaagtacgggctgaagaagggcagcaagaaggtggtgctggagtccctgaccccctaccggatggacgtgtactaccagtccatgaccggcaagtactacctggtgggcctcaagcactccgacctgaagttcgagaagggccagtacaagctgaacgaggaggcctacaacaaggccctggtggccgagaaggtgatccccgagggcaagtcccggaacgacctgggcatgatggggatcgagttctgctggtccttctaccggggcgacgtgatcgagtacgagaagaacggcgagatcaagcgggagctgttctggtcccgcacgatgcccaagaactcgaactacatcgagaccaagcccatctccgccggcaagtggaagggcaagaagcagaacttcgtgggcctcgccaagaccaagtacatcaagaagatcaggtccgacatcctgggcaaccagtacgtgtgcaacaaggagaagttcatcatggaggtggacaagtccaagagacccgccgccaccaagaaggccggccaggccaagaagaagaaggactacaaggacgacgacgacaagtga

SEQ ID NO: 300 - DNA, 4164 bp, synthetic construct
  source 1..4164: mol_type = other DNA
atggcccccaagaagaagaggaaggtgatggagcggtactacctgggcctggacatgggcaccagctccgtgggctgggccgtgaccgacgagaagtaccagatcgtgcggaagaagggcaaggacctgtggggcgtgcgcctgttccccgaggcccagaccgccgccgagcgccggaccaaccgggtggcccggcgccggcggcagcgggagaaggcccgcatcggctacctgcgggagctgttcgccaacgagatccagaaaaccgaccccggcttcttccagcggctggacgacagcaagtacttccaggaggacaagatgatccaccagcccttcgccctgttcgccgacagcggctacaccgacaaggagtacttccaggagtaccccaccatctaccacctccggaaggagctgctgaccagcaccgagccgcacgacgtgcggctggtgtacctggccgtgctgaacatgttcaagcaccggggccacttcctgaacgccagcctgaccgacgagagcatcggcaacctggccgacctgttcgagaacctgcgcatcgccgtgaaggaccagctggacgtggagctggcctaccccgagcgcatggaggacctggagaacatcttcatcgacaagtccctgtccaagaccgagaaggtcgagaagatcaaggccctgctgaagatcgacaagaaggaccggctgcaggccgagctgtggaagatgatctgcggcctgtccggcaccctgtccgtgatcttccggcaggacaacttctccgaggaggacaagaagtacaagctgtccttccgggacgggaactacgacgagaagatcaacgccgtggccgagatgctgagcgaggagtccctggacgtgctgatgctgatcaagcagatccacgactggggcgtcctcgccgacatcatgcgcggcagcggcaagacctacgagtacctgtccttcgcccgggtggacagctacgagaagcacaagaaggacctggagaccctgaagtacctgtacaagacctacgcccccgagaagtaccacgacatgttccgggtgatgaaggacaacaactactccgcctacgtgggctccgtgaacgccgggaaccacgtggagcggagggggtacaagcacaagaccgaggacttctactccgccctgaagaaggagctccagaacttccccgagagcgccgagcgccagtacgtgctcaacgagatcgagaagggcaccttcctgcccaagcagctgaccgcctccaacggggtggtgcccaaccaggtgcacatgaaggagctgaagaagatcctggccaacgccgagaagtacctggccttcctgcagcagaccgacgagaccggcctgtccgtgagcgagaagatcatccagctgttcggcttccagatcccctactacgtggggcccctggtgaacaaggccgacaaccacgcctgggtggtgcggaaggagggcgggagggtgttcccctggaacttcgagcagaaggtggacgtgaagcgcaccagcgagctgttcatccagaacatggtgaaccactgcacctacctgagcgacgagtacgtgctgcccaagaactccctgctctacgagaagttcatggtgctgaacgagctgaacaacctgcggatcaacggggagaagatctccgtggccctgaagcaggacatctaccaggacctgttcaagtccgggaagaaggtgaccgccaagcggctgtgcgactacctgatcgtgcacggctacgtggacaacgagacccccatcgacctgtccgggatcgacggggacttcgtgaaccgcctggccaactacaagaagttcagcgaggtcttctacgtggagaccctcacctacgagcaggagcagatggccgagcagatcatcttctggtccaccgtgtacggggactccaagaagttcctccgggagaagatccaggagaactacggggaggtgctgagctccaaccagatcaagcggatcctgggctacaagttccgcgactggggccggctgtcccgggagttcctgctcctggagggggccgacaagaccaccggggagatcagcaccatcatcagccgcatgtggaacgagaactacaacctgatgcagctgctgagctccgagcagttcacctaccgcgaggaggtggagaaaaagaccaagcacatggaaaagaccctgagcgagatcacctacgaggacctggaggacctgtacatctccgcccccgtgcggcggatgacctggcagaccatcctgatcctgaaggagctgtgcggcgtgctgggccagtaccccgacaaggtgttcgtggagatggcccgggagcacggggagaagaacacccgcaccgtgtcccggaagaagaagttcatggacctgtacaagtcctgcaaggacgaggagatccagtgggccaagcagatcgccgacaccgaggagcggaagttccgctccaagaagctgtacctgtactacacccagaaggggcggtgcatgtacaccgggacccggatcgagctcagcgacctgttcaacgacaacctgtacgacatcgaccacatctacccccggcacttcgtgaaggacgacaacatcgacaacaacctggtgctggtgaagaagcaggtgaacgcccacaagagcgacgtgttccccctggagcgggacatccagaagaagcaggccgccatgtggaaggagctgcggcagggcaacttcatcaccgaggagaagtacaagcggctgacccgcaacgaccccttcaccgaggaggagcaggccggcttcatcagccggcagatcgtggagacccggcagggcaccaaggccatcaccgacctgctgcagcagacctgcccccagtccaagatcatctacgtgaaggccggcaacgtgtcggccttccggcagaagttcgacctgatcaagtgccggaacgtgaacgacctgcaccacgcccaggacgcctacctgaacatcgtggtggggaacgtgtactacaccaagttcacctccagcccccgcaacttcgtgcgggagtaccggcagaacaaggagaagcacccctaccacatgtaccggctgttcgactacgacgtgcggcggggcgaggaggtggcctgggagatcgggaaggacgggaagggcaagtccatcagcaccgtgaagcgcatggtgctgaagaacaccccgctggtgacgatgatgaacttcgaggtccacggcgggctggccgaccagaccctgtacagcgccaaggacgccaaggacggcgagggctacctgcccctgaagtccagcgacccccggctgcgggacgtggccaagtacgggggcttcaccaagtacaccgggacctacttcttcgtggtcgagtacggccaggagaagaagcggatccggagcatcgaggccgtgcccctgtacctggccgagcgcctgtccgaccgggagaacctggaggtgtactgccgggacatgctgggctaccaggaccccaagatcatctgccggaagatcaagatgtacagcctgatgaagatcaacgggttctacctgtacctgaccgggcggaccggcacccggctgaacgtcgtgaacgccgtgcagatgatcctggactacgagaacatgtactacgtgaagcggatcgccgacgcctccgagcggaagtacaccgacgaggactacgaggagcacgaggtgatctccaaggagaacaacctgcggctgtaccggcagctggaggagaagcaccgcgacaccatctaccagaagcggcccaaccccatgggctccaagctgcaggagatggaggggcggttcgaggagctgtccatcgcccagcaggtgaaggtgctcctcgagatcctcaagctgtcccagcggctgaaccagggcgccgacctgaccctgctgggcggcgccaagaaaaccggcacctccaagatcggcaagaagatctccgagctgcaggagtgcaaggtgatcaaccagtccgtgaccggcatgtacgtgaacgaggtggacctgctgaagaagaagagacccgccgccaccaagaaggccggccaggccaagaagaagaaggactacaaggacgacgacgacaagtga

SEQ ID NO: 301 - DNA, 4134 bp, synthetic construct
  source 1..4134: mol_type = other DNA
atggcccccaagaagaagaggaaggtggtgcacaagaagctgatctacagcatcagcatcgacctgggcgccaagaacaccggcgtgtacttcgcctcctacgaggagcggagccgggtggacaacatcaagtccgagggcaaggtgtaccagctggaccccaacagctacaccctgctgctggagaaccgcaccgccaagcggcaccagcggcggtgcttcgaccggcggcagctggtgaagcggctgttccgggtgatctggcagaagcactttgccctcatgtggaacgacgagacccagcaggccatcagcttcctgctgaaccgccgcgggttcacgttcgagcccgagaacgagaacgagcggcaccggcgctgctacttcgaggagatcaagaagatcctgaccaccaccaactacccccaccggtacctgaagcacttctgccagaagctgcacaccggcaagttcaagggcctggacgagaagaagctggccaacctgatcggccacctgaacaacctggagctgaagccgctgcggtggtacttcaacgacaagcggcactcccagggcgactactgggacaagaaccggctccaggagatcttcatccactgggtgatcaacacctggcggatcgacaagcagaaggacaaccagcacgacaaccagaaggagaaaaagaccaacggggagtacaactaccggaagctgaagaacaacctgcagcaccaggaggacatcatcgagttcttcctgaccaccgaccccaagcgggccatcccgccctaccaggacaacaacaaccggcaccctccccggtgccagtccctgctgctgaaccggaagttcctggacgaccactacccgcagtggcagatgtggctgcgggacctgaagaagctgtgccccgaccccgtgaaggacttcatcgactccctgcagtccctgatgtcctccggggacaagccctacttcgtggagtccaactccgtgtactgccagagcatcagcgacctggacgcccggatcctgcagttcatcttcgaccaggccaaggacagcgaccccttcaagctgaacgagatcttcgcctacacgaagaagctgcggcagctgcagagcagcagccaggagaaggagcaggcccgcgaggacatcgagcggaccatcgagtccagcaagctgagcaagaacctcaagaccgcccggaactacgagaacgaggtgttcgccgagggcagcttcctgcacctggtgtgccggtactacaagtaccggcagaaggcccgggccgggcggatcttcatccacgacaccaacgacgtgttcctgacctactgcgaccggaagccccggcacaagaagcaccagctgctggacgacctggccagcctgctccgggtgtccaggacccggctgcggaaggtgatcgggtccaacgacaacagcaccgacgaggcccgggtgaccgcctggctgaagaacttcaccgggctgaagagcaacgcggagaagagctgcgacgagcagaagaagtaccggggcaacatcaagaccaagatcgagggggtgtacttcaaggaccagaagaacgcctccctctacaaggtgtgcgagcgcagcaagaagctggtgcacgccatcaactgccagctggacaagcccaaggacaccaccctggacaacaaccccgccaaggccatctacaccctgtcccaggtgcacaacctgatcttcaaggacaggtccgggaacgccaacacctgcgccgtgtgcagcgccgacaacgcccagcggatgcaggagatcagcgggcgggccaaggcccagcggctgcccgccatcaacacccggctgatcgacggcgccgtgaagcgcatcgcccacatcgtgggcggcgccatcgccgacgagggctggaagcacatcgagcagaagctgagccagggccaggccgtgcgcgtgcccatcatcaccgagtccaaccggttcgagttcgaggagaacctgggcgtgctgaagaagaaggccaagaagtacgggaagcagcccgacttcttcgtggagaaggagaagcgcatccggcgcgcctcccagggggtgtgcccctacaccggggccgacctggacgggggcgagatcgaccacatcatcccccggtccagcgagaccggcaccctgaacgacgaggccaacctgatccacgcctccaaggagggcaaccggcagaagtccaacaagaagtacttcctgtccgacctgcacgcccactacaagcgcaagcagttcgactccaccgacgacaacgagatcacccggtggatcgaggagcagctgggcggcgacaagaagtacgagttcaagttcggccggtacagcaacttcctgaacctgaccctggaccagcagaaggccttccggcacgccctgtacctccccacgaaccacaagctgcggaagctggtgatcaagaccatcgatcaccggaagcagagcttcgtgaacggcacgcagcggtacttcgccgaggtgatcgcccggaacttctaccagaaggccaagaagctgggcaaggcccggcagatcagcttcgactacttcgccgtggaggcccggtcctccacccggggcgacggggtgtccgactaccggcggcagctggagaaggacgacgccatcctgcagaagtacagcaaggaccccagcaagaagcagaacccctacagccacctgatcgacgcccagatcgccttcgccatcgtggccaacaaccacaagcgcgacggcgggctgaagctggacatcgccgaccacctcgaccccgaggacatctacaagaagatccggctgaccgacagcaacatctactgcgacaagctgaagcggaagaagcccaccgagaccttctgctcccaccgggccttcacgcgcgacaccctgtacgccgaccactacctgcccatcctgctgaagaaggagaccgacatcgtgtgtcgggccgggttcacctggaagaactccttcaagttcgagagcaaggacaaccagaacctgcagaagctgctgccgctgtgcgcccacctgcccagcggcatcgagatcgccgccctgtacgacaagctggcgatcctgcccaagttcaaggagcagctgcaccggcacgggtactactacctgtgcgtggacaagcagaagctgcacgacttctggctgcggggccgggacgacaccggcgccttcagcgacaaggagttcttcggcttctgctggtccaccatcgggtaccggaccgagaacaagcccatcgccaggcccaaggacctggtggacatcctgcagaaggatgccaagttcaaggtggggaagaacgagtgcgtggagctgcccgtcaagaaggagtggcagcggtgcctgaccgcctggcagaactccgggaaggacgacaaggagttcctgtgcttcctgcaggagtacttcaaggcggcccccaaccacaagcacgcccaccagaaaacccggaacgtgtacagcctgcccgtcaagaccggcgagggcaagctgctgctgcggcggcggaactggaacgggaagcacaccgaccagatcatcaacgactccgacagccgcagcgtggacaacaagccctgcctgcccgtgcggaccagcgagtacaagaaggccgagcggctggcctggtgggcccagaccaagaacacggtgaagctgagcaccgacacctaccacaacggggagcacatcaactccgagcggtggtaccccatcgagtgccaggacttccccaccggggtgaaggggatcgagtaccgggtggacgactgcacccggccctcgatccggctggtgctggagcggtccaaggccatcgtggccgacgggatcctcaagcaccccctgtgcaaggccaaggagaagtccaaggccaagagcctgatcgagggctccaccggcaccgacgtggagtacaaggcctccgggtacaaccgggagatcaccagcgccctgcaggagtccctgcggaagcaccactccaagagacccgccgccaccaagaaggccggccaggccaagaagaagaaggactacaaggacgacgacgacaagtga

SEQ ID NO: 302 - DNA, 4269 bp, synthetic construct
  source 1..4269: mol_type = other DNA
gccaccatggcccccaagaagaagaggaaggtgatgcggaagaaggtggaggactacgccatcgggctggacatcggcaccaacagcgtggggtgggccgccatcgactgcgactacaagctggtgaaggtgaacggccgcgacgcctggggcgtcgtgctgttcgagagcgccaaccccgccaaggaccggcgggtgttccgcagcgcccgccggcgcctggagcggcggcggatgcggatccgcctgctgcaggagctgatggccgagggcatcgagcccgtggaccccaacttctacatccgcctgaaggagtcctcctaccacgtgggcgagggcaagtacttccgcagcaaccacttcaacctgttcgacggcggcgagtacaccgacgcccagtacttccacgagtaccccaccatctaccacctgcggaagcggctggtggagaacaaggagaaggccgacatccggctggtgtacctggccatccaccacatcatcaagtaccggggccacttcctgaacgagggcgggatggactccgccggcggcagccccgaggtggccgccggcgagctgttcggcctgctgaacgagaactacaagaaggacctgttctacatcggcaaggaggaggccttcacccaggccctgctggacggcaagtccagcaggagcatgcggcaggagaacgcctacaacgtgctgaccagcgagaagaaggacaagttcgtgaccgccctgaccaaggcggtcaccggcctgaaggccaacctgaccgacctgctgtgcctggaggacgaggaggacgccatcaaggacgagaacgacaagcccgtgtccatctgcttcgccgacgccaagtacggcgaggagaaggaggacaagtactacagcctggagcgggccgacatcctgctggccgccgagaagctgtacgccgccatcgagctgaacgccgtgctgcgcggcaagaagctgctgtgcgaggccatggtggacaagttccggaagcacgccgaggacctggccgccatccggaagctgatccggggcatgggcgacaaggccctgtacaacgacttcttccgcaagggcaagggcgccaactacaccggctacatcggcgacaagcgctacggcttctacggcgaccgcggggacgtctgcaaaaagaccaccaaggaggacctgtacaagcggatccgggagatcctgaacaaggcccccgagtcccgggagaaggagtacatcgagaaggagatcatcaaggaggacttcctccccctgatcacctccaaggacaacgcctacatcccctaccagctcaacctgaaggagctggacgccatcctggagaaccagggcaagttctacccctgcctggccgagaacgccgacaagatccgggccctgctgaccttccgccggccctactacgtggggaccctgaaggggaagttcagctgggccggcgacatcgagctgcccgaggaggagatcacgccctggaacttcttcaagaccctgggggaggaccggctggacaagctggccgagaacttcatctcccggatgaccaacgactgcatcctgatcaagggggaggacgccctgcccctgaactccatgctgtaccagaagtacgtcctcctgaacgagatcaacaagatcaaggtgttcgacaagcccatcagcgtggagtggaagcaggccatctacgagctgtgcaagaagcgcaagaccgtgaagaagtccgacatcgccgcccggctgaacaagaagttcaacatccagaccaccgccgacaacatcggcgggctgagcgacgagaagaagctcaccgccagcctgtccacctacgtggacttcgtcaagatgttcggcgaggagttcgtgaaggccaacttcgacgccctggaggaggcggtccgcatcctgaccatcttcaacgacaccgacatccgcaagaagcggatcaaggagctgaaggtgttcgagggcttcgaggagcggctggccaagaagaacttctccggctggggcaagtacagccggaaggccctctacggcaccctgggcaacaacgggaagtgcgtgctggacatcatgtacgagaccaacgagcacatcaacgaggtgctgtggaaggaggagtacggcttcaaggagaagttcgtggacgagaccgagcccatcgagaagttcgtgtacgagcaggtggaccggatgcggatcagccccaaggtgaagcggggcgtgtggaacgccatccgcctggccgaggagctggccaagcagatcgggtgcgaccccaagtacatcttcctggaggacaccaccgagatcggggagaagaagcgcaccaagtcccggtacgacaaggtgtgcgagttctacaaggccctgaaggacgggggctacaaggacatcatcgacgaggagaacatgaagtactgccgctccgagctggccaagtacaaggacaagaagtccgccatggacgaggacaagctgtacctgtggttcatccagctgggccgcagcatgtacagcgacaccaagatcccgctggagaagctgcccgagtgcgagatcgaccacatcatcccccggagcctgatcgtggacaactccttcgagaaccgggccctggtgctcaagaaggagaaccaggccaagggcgacggggcgatgagcgtggacatcgtgaagcagatgcggcccttctggaagttcctgtacgacaacaagctgatcgggagcaagaagttcaccaacctgcagaaaacggagatcaccgagaaggacctggccggcttcatcaaccggcagctggtggacaccggctacatcgtgcggctggtgaaggagctgctgatgcgccggttccccaacgccgaggtgcgcggcgtcaagcccaagctgtcctccaccatccgcaagcggttcgcctccgaccacacgtacttcaacggccaggagtacgtgacggagaaggggaaggccgggttctacaagatccggagcctgaacaacttccaccacgccaaggacgcctacctggcgtccgtggccggcctgttcaccacctacagctgccccctgtgggggaacagcgagtacaacaaggccatcaactactacatcaagaaccccgagaagtccaagtacaacaccaagggcggggacaaggagagccaggagaaggccaactcccggaccaccgccacgctgatcaacaagcggtacggcttcatcgtgaacctgatgatgcagaccgagcggcccgacctgttcgccctggacgagaagtccggggagtacctgtgggacaccaaccggtacaacaacatgctggagacgatggcccgcaacacctgcaacgtggtgaagaagaagcagtacatggccgccagcgacttctacgaccagaccgtgtacagccccaagagctccaagaaggggctgatccccctgaagagccacgggggcgaggacatgcccaccgagttctacgggggctacagctccctgagccccgcctacttcatcgccgtgcagtacaccaagaagggcaaggtgaagtacgccttcgggaacatccccgtgaagatcgccgtgaacggcaccgccgccgtggacaagtacgtgcgggagatgtacggcgacgaggccaaggtggtgcggaagatctacaagtaccagctgatcaactacgaggggcagcaggtgtgcatctccggcaacctggacctgcagaacgccacggagatctacgtggcccccaagttcgaggagctgctgtggctcgtcgagaaggggaaggtggacatcctgtccggcaagccggacaaggagggggagatcaaggacttcaacggcctgatcaaggagttcatcccccacatctgctacatcatccgccggaagctgcccctgtacgccaacctggtggacaagctggagcagatcgacaaggagtacctggacgagatgacgatggaggagaaggtgaagctgctctccgacgtcatgctggcctgccacaccggcgccggctccgccaccctggacaagcgcctgggcggcgagagcttcggccggatccggaaggtgatcgacccctccaaggtggactggatcgacaagagcctgaccggcctgtacacccggaccaccaagggggtgaagagacccgccgccaccaagaaggccggccaggccaagaagaagaaggactacaaggacgacgacgacaagtga

SEQ ID NO: 303 - DNA, 3447 bp, synthetic construct
  source 1..3447: mol_type = other DNA
atggcccccaagaagaagaggaaggtgatgaacaacaactacgtgctggggctggacatcggcatcaccagctgcggctacggggtggtggacctggagtcccggaagttcgtggactacggggtccgcctgttcaaggaggggaccgccgccgagaacgagaagcggcggtccatccgcggccggcgccggctgatcagccggcgcaagacccggctgaaggacatgcagaagctgctgaagaagaacggcatcatgtccgagaactacaagtccctgaacaacatctacgagatccgctgcaaggggctgacccagaagctgaccagcgacgagctgacggccgccatcctccacatcaccaagcaccgcggcagcgtgctggagaccgtggaggaggacgccgagaagtccgtggacaccgagggcctgaaggccaccctgcagcggaacgagcagctggtgcggtccggcaagtacatctgccagatccagatggagcggctgaaggagaagaacaagatccggaaccacggcaacaacttctccaccaaggactacctggacgagctgaaggagatcctggaccaccagaacctgaacgacgacctgaagaagtccatcgtggagatcgtgctgcggcgccggaagtactacgagggccccggctccgagaagagccccacctcctacggccgcttcatcgaggtggacgggcacatcgagaagatcgacctgatcgagaagatgcggggcaagtgctccgtgtaccccgaggagctgcgggcccccaagatgagcgtgtccgccgacctgttcaacttcctgaacgacctgaacaacctgaccgtgaccggcaacaagctctccaccgacgagaaggagagcatcctgagcatcatcagcgagaaggggaacatcaccctgcgccagttcgccaagaagctggaggtgtccgaggacgacatcaccggctaccggatcgacaagaacaacaaggccatcttcaccgagttcaagggctacaagaagatcaagtccatcctggagaaggagggccggtccgtgagcctgaaggactacaagatgctggacaagatcatcgagatcctgaccaacaagaagggcatcgaggaccggaaggacgacctggccaacgccgacatcgggctgaacgacgcccagatcgaggtgctggccaacaccaccgggatcgtgggctaccactccctgtccttcaaggccatccggctcctgaacaaggagctgttcgagaccgagatgaaccagatgcagctgctgcacgagctgaagctgttcgaccagaaccgcaagtccaccaagggcaagaagaacatcgagaccgacgacgaggccatcctgtcccccgtggccaagcgggcccagaacgagaccttcaaggtcatcaacgccctgcggaagaagtacggcgagttcaactccatcgtggtggagatgacccgcgacaagaactccgacgagaagaagaagcggatcaaccagttccagaagaacaacgagaactcctccaaggacatggacaagttcctgaaggaggccggcttcgaccccgagaagatcaacggcaagacccggatgaagatccggctgtacctgcagcaggactgcaagtccgcctacaccttccagcccatcgacctggcccggctgatcaaggaccccagctacaccgagatcgaccacatcatcccgatctccatctccctggacgacagccagaacaacaaggtgctggccctgcacagcgagaaccagcagaaggagaacctgacccccttcatggccttcaactccggcaagttcaaggggatgggctgcacctacagcgagttcaagacgaacgtgctggccaacaagaacatcccctacaagaagaagctgaacctgctgaacgagaaggacatcaccaagctggaggtggtgaaggagttcatcaaccggaacctggtggacacctcctacgcctgccggaccgtcctgaacaccctgcaggactacttcaaggacaacggcatcgacaccaaggtgcacaccgtgaacgggcggctgaccgacctgttccggaagcggatccacctgcccaaggaccgggaggaggacttcctccaccacgccgtggacggcctgatcgtggccagcatcaagaagagcaacctgctgaacgggtacctgagcaagcacgagttcagcgacctgtacgacgagatcaccggggagatcaagaccatccccgacgacaagcagttctacgatgagacctacatcaggttcatcctggagctgaaaaccatctacgaggagtccaacaagtactacaaccacctgatcgacaaggccgacatgctgttctaccccatcaagatctcccagaagatcaacaccaagcccaaccggcagatcgccgacgagacgatctacagcacccggaagtacgacgacaccgactacctgatcgagaagatccccgacatctacgaccccaaggacaagaagtgcaagcggctggtggagaacatcctgaacggcaccgacaacatctacctgatgtccaagcacgacccccagaccttccagctgatccaggacatcgtgaagtaccactacgggcagttcaaggacgacggggagacctacaaggtggtcgagaagaaggggaagaagaagatcatcctgaacggggagaaccccctgaccagctacaagaacgagaacggcttcatccacaagtacagcaagaagggcaacgggcccgccatcgtgagcatgaagtaccagtccgagaagctgggcaaccacctggacatcaccaagaactacgacgccaagaacaagaaggtgatcctgaagcagatcagccccttccggaccgacttctacaagtgcgaggacggcaagttccgcttcgtgaccgtgcggtacagcaacgtgaagtacaagaagtccatgaagcggtacgccatcgacaaggactggtacgccgtggagaaggagaagaaggggatcaagtccaaggacgtgttcctgttctccatgcaccgggacgagctgatcggcatcgtgaagaaggagggggacaagtacatcttcgactcctccaccgagtccaacggcaagacgatgtaccacgacgggatccaccccgagatcctgaagttcaccgccaccaacaacgactccgagaaccggatcgaggtgaagccccgctacaccagctgcaagaagcagctgatcagctccctgggcagcatgcggaacctgaagaagtacgccaccgacgtgctgggcaccctgtacgaggtgaaggacaacaagctgaagctggagttcgacaagagacccgccgccaccaagaaggccggccaggccaagaagaagaaggactacaaggacgacgacgacaagtga

SEQ ID NO: 304 - DNA, 4371 bp, synthetic construct
  source 1..4371: mol_type = other DNA
atggcccccaagaagaagaggaaggtgatgtacaacaaggtgctgtgcggcctggacatcggcaccaactccgtgggctggtgcctgaccgacgagaacaacaagatcatccggaagaagggcaaggccctgtggggcgtgcggctgttcgacgaggccagcgactgcgccaagcggcggcagtaccgcagcacccgccgccggctgaaccggcggcgggagcggatcgacctgctgcgggagctgatggccgaggagatccaccgcgtggaccccaccttcttcatgcggctggacaactccttcttccagaaggacgaccgggaggaggacttcgactacaccctgttcaacgaccggaactacaccgacagcgactactaccgcgagtaccccaccatctaccacctgcgcaagcacctgctggagtcccgctccaaggaggacatccggatgatctacctggccctgcaccacatgatgaagtaccggggcaacttcctgtccaacgccaaggagttcgagcccatgaaccccaacgacgccgacgagtacttcgaggagctgaagcagtccctggccaacacccgggacggggtgaccatcgagtacgacaccaccaaggacttcagccgcctgaaggaggtgttcacctccgagcacggcatcaccgtgctcaaggagaagctggggaagatcctgaaccccaacaacgacgcctacatcaagaagatcgtgatcctgctgatcgccggcgggaccatcggcatcaaggacctgaagttcgaccagaccgaggacctggacttcaagaacctgtgcgtgaaggacgagaagttcgaccagtacatcgccaccctgctgtccaccaacgaggagcgggaggaggagatcaacgccctggcctcctgcaagaagatctacgagttcttcctgctggggaagctgctgggcgaccagtgctacctcagcgacgccatggtgaagcggtaccagatgcaccaggagcagctgcgggagctgaaggcctacgtgaagaagaaccacaaggacaagtacgcccggatcttccgcaagcccatgcggaacaagtccaaggccaacggggtggagaaggagaacaagaaggaggagctgaacaactacgccatgtacatcggctccaacctgaccgggaaccacaagaaccggaccgcccactgcaccgccgaggccttctacgccttcctgaagaaggagctggggctgaccaaggtcaagagcacccagaaaaccaaggagacctacgagtcccagatcctggacctgatgtccaacggcgagttcctgccccggctgaactccaccgacaacggggtgttcccctaccagctgaacctgatggagatgaaggagatcctgaaccgccagagcgagttctaccccttcctgctgaccaaggacgaggacggcatcaccgtgaaggaccagatcctgtccgtgctggagtacaagatcccctacttcgtggggcccctgatccccaaggaggaggggaacgagcgctccaagtacgcctggatcaagcggaccgacgagaagatccgcccctggaacttcaagaaggtggtggacctggacgagaccgccaagaacttcatctacaagatgctgaacaagtgcacctacctgcccagctgctactgcctgcccaaggacagcctgctgttcagctacttcaacgtgctgcagatcctgaacaagaccagcatcaacggggccagcatgcccaaggacttcaaggagtgcatcatcgagaacctgttccgcaagcggcggaaggtgacgaagaagcagctcgtggagttcatccgggccgagtccggggacaaccaggcccagatcaccacctccaccggcaaggagatggaggagatcaacgcctccctggcctcctactacgacttcaaggacatcttcggggaggagtacgtgtgctcccacatcgaggagatcgaggacatgatccgggacatcgtgatcttcgaggacaagtccatcctggagaagcgcctgaagcaggtgtaccggatccaggacaagaccgccatccggaagatcaagggcctgaactactccaagttcagcaacctgagcaaggagctgctgaccgacctgaagttctacgacgagagctccgagcggaactgcagcgtgctgcagctgctggaggagaccaaccagaacctccaggagatcctgtacgacgagacctacggcttccagaagaagatcgaggagtacaacaagaaccacagcggcaccggcgagttcgagaccatcgaggagtacgtgaaggagctgggcgccgtgtccccgggcatgaagcggcccctgatccaggcctacaagatctgcgatgagctggagaagatcatcggccagcccatcgacgagtactacgtggagtgcacccggaccaaccgggccgagaagaagcggaccagcagccggtacaagaagatgcaggagctgtacgaggaggccatcaagaccgccggcgacgactacgagttcaagtccgcctacgagaagttcaagtccgccgaccccaaccagttccagagcgacaagtactacctgtacttctcccagatggggaagtgcatgtacagcggcgaggccatcgacatcggggagctgtacgacaccaacaagtacgacatcgaccacatcctgccccagagcatgatcaaggacgacagcctgtccaaccgggtgctggtgaagcagagcctgaaccgcaccgacaagcgggaccagtaccccatcccccagagcatgctcttcaacggcaactaccgggaggcctaccggttctaccagagcctgaaggagaagaagctgatcagcgaggagaagtaccaccggctgatccgcaaggaggccctgtccgagaaggagctgagctccttcgtgaaccggcagctggtgagcaccaaccaggccgtgaagggcttcatcaacgccatccgctacttcaagaccaccgagagcttcacccccaagatcatcttctccaagagcgagaacgtgagcgacttccggaagaagcacgacctggtgaagtgccggagcgccaacaacttccaccacgcccacgacgcctacctgaacatcgtggtggggcggaccatcgacaactacttcgccccctacgacccctacatcagccacgaccaccggaacagcgtgctgcaggagatgcacgccaacgggctgaccaccaacccctccaagatcttcgagcagaacaaggaggggaccaagaagaacatcaccgaccgggacggctacgtggtgtgggactacaaccagtccatccagaaggtgaagaaaaccatcaagaaccggtacgacatcctgaccacccagcgcacctacttcggcaactccttcttcggcaagatgaccatcatgccgaagggggagggcaacatcagcgtgaagaagggctgggacaagcagaagtacggcggcttcaaggagtacagcttcggctcctactccctgatcaaggtgaaggaccagttcatcctggaggccatccccacgatgctgcggaagcggaaggaggagtacctccgggagcgcttcggggagtacgagatccgcctggacaacctgaagatcaacaccgtgttcgaggtggacaagaagaagttcgtgatcaccggcaagaccggcgaccggtacctgctgatgaaccagaaggaccggatcttcagctccgagcagatggagaccctgcggaagatcgacaagctgttcgacaagctgaaccagaagatcggccccaacgaggaggaggaggaggagcggaagaagctccgggagtgcggcatcaaggtgaacgacgccgacatggtgatcgcccccgccaagaacgaccaggccaaggagatgcggatcacccaggaggaggccgtgcagatctacgagaccttcatccagctgttctccaaggagatctactccttctccgtgatcaacaagctgggctgcaagctggaggggaagaagaaggagttccagtccctgagcctgttcaagaaggtgtacctgatccagaagatcaacaacctgctgcgctgcaacgagcgcaagaccgccgacctgcgggccatcggcttcaaggagcaggagggcaccctgactatgaaccagaagctgagcacctgccggatcgtgttcgagagcatcaccggcttctaccgcaaggtggtgttcgagtgcaaggacggcgtggagtgcggcaagagacccgccgccaccaagaaggccggccaggccaagaagaagaaggactacaaggacgacgacgacaagtga

SEQ ID NO: 305 - DNA, 4065 bp, synthetic construct
  source 1..4065: mol_type = other DNA
atggcccccaagaagaagaggaaggtgatgaagaactacagcatcggcctggacatcggcaccaacagcgtgggctgggccgtgatcaacgaggacacctacaaggtgctgaagaagggcaacaacaagctgtggggcgtggagaccttcgcctccgccgagcaggccaaggaccgccggctgaagcggagctcccggcgccggtacaaccggcgcaaggagcggatcaagatcctgcaggacatcttcagcaaggagatcaacaaggtggaccccaacttcttcaagaagctggaggagtccaagctggagaacagcaagaagaacatccccatcaacgggtgcgagaacaagaacatcaaggagtactacaagaagtaccccaccatctaccacctgcggaagcacctggtgaacaccgccgagaaggaggacatccggctggtgtacctggtgatccaccacatcatcaagtaccgggggaacttcctgtacgagtccgacttcaacgtgaacaacatcaacttcatcaacaacctgaagtccctgttcgagaactgcctgaagtacaacaactacctggagatctccgacaacatcaacgagatcaacttcgacgtgatcgacaagacgatgctgaacgacagcaagaacgaccagtcgatcaagctgaagaaggagctgtccaagatcatgtccaagaacaccatcaacgagttcgtgaagctgctgcagggcgacaagttcgacgtgatcaagctgttctccatcgacctggagggcgagctgaaggtgaccttcaaggacaagaacttcgacgagagcctggacaagctgtccgagcacagcgagtacgaggacctcgtcgagttcatctacaacctgaaggacatctacgacggcatcaccctgaagaagctgttcaagaacagcaacatcacgtccctcagcgacctgatggtgtggaagtacgagaagcaccagaaggacctgatcctgctgaaggaggtgctgaagtccaaccaggagctgtacgacaagatgttcagctacaacgacacctccatctaccggaagtacgtgctgaacaagatcaccagcgaggacctgaagaaggagatcctggggtgcctggacaccatcaactgcaaggaggacatccggaccaagatcgagaacgacctgaccgagaacaacttcatgccccggatcaccaccgtggagaacgggatcttcccctaccagctgaacaacagcgagctgaaggccatcatcaacaaccaggggaagtactaccccttcctgctggagaagtggcaggacggcaagaccctgctggagcggctcctggagttccggatcccctactacgtggggcccctgaactccaagagcgagttctcctggctggtgaagcagaaggaggacaagatcacccccttcaacttcaacgaggtggtggacatccccgcctccgccgagcggttcatcacccgcatgatcggcaagtgcagctacctgatcaaggaggactccatgcccaccaacagcatctactactccaagtacaaggtgctgaacgagctgaagcagatcaagatcggcatcagcggcaaggagcggaagctgagcatcgagctgatcaaccagatctacaacgagctgttcctcaagaccagcggcaccatcaccgacaagaagctgaaggagtacctcaagaccaaccccaacttcgacatgttctacaacgagaacatcaacatcaccgggtacagcgccctgaacgccttcgccaacaacatgaactcctacgtggacttcttcggcgagaacggcatcttcaacggcaccaacttcaacatcgacgacgccgaggagatcatcaagtgcgtgaccatcttcgaggacaagaagatcctgaagcagaagctgaaggacaagtacaagtcctgcaacctggagcgcatctgcaacctgaagtacaaggggtggggccggctgagcaagaagctgctgatggagacctacggggtgaacaagaacaccggcgaggcccacaccatcatggagctgctgaaggagaccgacatgaacttccagcagatcctgttcgacaaggactacaacttccaggagatcatcaaggacgagaacaacaccaagcaggtgaccaagatcaactacgatctggtgaaggacctggtgacctcccccgccaacaagcgggccatctaccagagcctgaagatcatcgacgagctggtgaagttcatcggctacaaccccaacaacatcttcctggagatggcccgcgagaactccaccaagaagcggaccgacaaccgcaagcggcagctggagaagatctacgacaagtgcaagaacgagctgaacaactacggcaccctctccaaggagctggagaggatcgacaacaaggagatcaccaacaaggtgttcctgtacttcatccagaacgggaagtccctgtactccagcgagaagctggacctggacctgatcctgtccaagaaggacaactaccagatcgaccacatcatcccccggaccctgaccaccgacaacagcctggacaacctggccctggtgctgcacaacgagaaccagaacaagtccagcaacttcatcctgcccgaggagtaccggacctccgagatcatcaagtggtggaaccacctgaagaagatcgggctgctgaccaccaagaagtacaacaacctgtgccggacctccttcagccaggaggccatcgagggcttcatcaaccggcagctggtggagacccgccagatctgcatcaacgtggccaacatcatcgacacgtacctgaacaagggcaagaagatcaccaacatcgtgtacctgaagtccgggatcagcagcgggtaccggaacaagtacgagctgttcaagtaccgggggctgaacgactaccaccacgcccacgacgcctacctggccgtggtgctgggcctgtacaagaagaagtacttcaagtaccccgacgacttctccaccatcaagagcatcaacaagaccctctacgaggaggggaagttcaaggaggccaagtacgggtacttcctgaacagcctggacgaggagtacagcaagcactacaacatctccaactccttcaacctgaaggggttcaacgagaccatcatccggaccctgcaccagaacgacatcggggtcacccgcaagacgttcatcaagaacgacggggagctgttcaaccagaacccctgctccaaggaggaggccaaggtgcccctgaagaaggggatggacatcaagtacggcggctacacctccctgaaccaggggtacttcgtgctggtgaactacaagaagggcaacaagttcatcggcatccccctgtactacaccgacatgatctcccgggacaagtacatccggagcgagctgaagctgaaggagaacgagacctacaccatcaagaaggacaagatccccttcgacaccaagatccgctggaagaaccagtgcttctacatcaaggggtactccaacggcctggagctggccaacgccacccagatctccttcgacagcaaggcctacgacgactacaagtacctgctgtcctacatcttcaacgagaaggacgtgatcaacgaccgggaggagaccaagatcgacgagctggccgactacgtgttcaccaaggccctgagctactaccccatctacaacaagaagctcagcaagctgcaggagaagtacaagaccctctccgacagcaacaacaagcggatcttcatccgcgagctgttcaacatcaccgggacctccaacaccggcgcgtccttcaagaagttcgacctgatcgaccgcatgcagcggctgagcaggcagaaccccaaggacaactgctacatcatctacgagtcccccaccgggatctacaagaacgagttcaacatcgagggggacaacgagctgaagagacccgccgccaccaagaaggccggccaggccaagaagaagaaggactacaaggacgacgacgacaagtga

SEQ ID NO: 306 - DNA, 4605 bp, synthetic construct
  source 1..4605: mol_type = other DNA
atggcccccaagaagaagaggaaggtgatgtccgacaagaagtactacctggggctggacatcggcaccaacagcgtgggcttctgcgtgaccgacgagacctacaacatcatcaagaagcacaagaaggtgacctacatctccgagaagaaggaggagaagaacaacaagcccaacaacaagtactacgggaaccacctgtggggcgcccggctgttcgacgccgcgtccagcgccaaggaccggcggaccagccgggaggcccgcaggcggttccggcggcggcgggagcggatcctgtacctgcagaaggagttctccaccgagcggaacaaggtggacccctacttcttcgacaggctgaacaacagcgccatccacatcgaggaccgcgacgccctgctgcaggagcaccacctgctgttcaacgagccccacttcaccgacgtggagttcttcaagaagtaccccacgatctaccacctgcggctggcccggatcgagcaccccgagcagaagttcgacatccgggaggtgtacctggccctggcccacatgatcaagtaccggggcaacttcctgttcaaggggaccatccccgagagcgggtgcgacgccgaccggatcctgaacaccttcaacgagctggacagctacctggacgagaaggagcggttctgctgcaccaacgagaaggccagcgagctgctgaaggtgttccagagcgagacccgggtgcaggacctgcacgacaagatccagtccatcttccccgtggaggacaagcacaacagcttcaagaaccagcggatctacctgatcgctggcgccagccgcaagaccgacgccgtgttcaaggacagccccgacatcgacttcgacatcatcgacgacgagatccagggggtggacatctgcctggggaacgccgacttcgaggagaaaaccctgtcggccatctccgaggccatcggggacaacaacaccaagatcctgctgtccctgaagaagatcttcgcccgccggaacatccagcggatcatccgggggaagaagagcatcagcgccgccatggtggccatctacaacgagcacaacaagcagctgaaggtgctgaagcagctgatcaagcggtacaaccccaactactacagcgccttcttccggcacgccgacgagatcaagctgtccagcagccagaccaacaacaagtgctccaagacctacaagacctacgcctcctacatcggcagcaccgtgctgaaggggaagcggcggcggttcaaccacgacaccaccacccccaaggagctgtactccaccatcgagtacctgctccccatctccaagatcaagcccaacaagaagggcgaggagcagaacttcaaggagaagcggcccggcgacaagaaggagctgctgaagatcgacaccctgatctccaacgacgactacctgctgcggcagaacagcagcgagaacggggtgctgccctaccagctgaacctgaacgagcggcggcggatcatcgagaaccagtccaagtactaccccttcctgtccaacctggacagcgacttctccgaccccaagaacaagtgcttccggatcgagagcatcctgaagtacaagatcccctactacgtggggcccctgagccccaaggccacccacaactgggtgagcatgaacaacgagtcccacgagcggatcaccccctggaacttctgggacatcgtgaaccaggagaaaaccgaggaggccttcatcgacttcctgaagaactactgctcctacctgatccacgagcccaccctgcccaagcagagcctggtgtaccagcggttcgtgctgctgaacgagatgaacacctggcagcggaacgggatccccctgtccaccgaggacaaggagtacctgatcaccaacctgtacctgaagcagcggaccatcaccaagctgagcaccatcgagaaggccctgcggatcaagtacaagaccaccgacatcaagatcaccaccagcgggaccaccaaggggaaggggatcaccgacgacgacctgcacgggaccctgtccagctggatcgacttctccaacgagaaggccttcgggcccgagctgttccacagcaagaagatccaggagatcgccgagatcaccatcaaggacgccaccctgttccaggacaagaaggtgaagcaggagcggctgaagcggttccacctgagccccagccagatcaagtaccggagcaacttccgctacaaggggtgggcccggctgagcaacaagctgctgaccggcatcaagatcagcctgcccaacgagccctacgactactccatcctggacctgatgtggaagaagtccctgaccctggaggagatcctcaagaccaaggaggaggacaaccccaagaactacaagtaccccttcctgctggagatcaagaaggagaacggggacgaccgggaggacatcgacgacatcctgtcccggctgcactgcagccccaagatggagcgggccatcttccagaccatcgagatcatcaaggagctgaagagcaccctgcacatcaagggcttcagcgagtacttcgtcgagaccggccgcttcaccggcgagaagaagcggaccaactcccggaagatcaagatcgagaacttctacaagggcatcgagaagcagctgtccgagagcgaccgggagggcttccagaccctgaagggccagctgaaggagttcaccaacaccaagctgaagaagaagaagtggtacctgtacttccggcagctggggaagtccctgtacaccgggaagcccatcgacttcaacaacttcgagaactacgacatcgaccacatcatcccccgggcccgggtgaaggacgactccttcaccaacctggtgctggtggagaagatccggaacaaggacaagtccaaccactaccccttcgtgaaccagtacgtggacaaggaggggatcgagttcatcaccttcctgaacaaggccaacagcaagatccggcccgacaagaagcggaaccggatcctgcgcaccaaggagctctccaacgaggagatctccgggttcgtgaagtcccagctgaccaccaccgaccagtcggtgaacgccgtgtgcaagatcctgaacctgatcgacaagaaggcccgggtggtgtacagccgggcctccaccgtggccgagttccggcagctgttcgggctggtgaagtcccgggacgccaacgacttccaccacgcccaggacgcctacctgaacatcgtggtgggcaacgtgtacgacaaggagttctcggacggcggcgtgcacgtgatcgcccacaagcgggactacatggagtccctgaaccggagcgtgaagtacatgttccaccacgacgagcgggtcctgaacaaggacaccctcatctggaagtccaagaactacatcatcggcaaggacggggaggagatcgaggaccccaactcccacgggaccatcgacatcatccggaagtacttctccatcaacgaccccctgatcacccggaagatggagcggaagcccaccctgctgttcagccagaacgagatcatctccgcccggaacggcggggcccagttccccctgaagcagtacaagcccttcaactccaagggcttcgagaccaagtacgggggctacagccacctgagcaacccctacgggatgctggtgaagtccgagggcaagaacaagaagcccatctacagcatcgagttcgtgccctcggtgtacctgggcaagcactactccgagatcaaggtgaagaagtacctgtccgagaacaagaagtgcaagaaccccgagatctgcatcaagcggctgcgcttcaacaccatcatcgagatcccgtgcatctcctccaccggggagaccggggtcctgcgggtgggcctggcctccggcaagaccaacgggcaccagatgggcctgatcaacatgaccgagcccaagatcgacaacaagtaccggtgcctgatcaagagcctgagcaagctggccgcctacgacgactccctgatcgccgagagcaaggacaagcagtccagctacgagaagtacgggatgaacgacatcgacgagaaccccaacgagaagatcaagcggaccgacctggaggagctgttcaagtacatcaccgaggtgctgtacaagaagcccgagttcgagtgcctgcccaaggtgagcaacaccctgctcgccctggagaccagcctcgaggagttcaagcagctgagcaccatcaaccaggtgcactgcctgtgctccatgctgaagatcatccaggccaagtccgtgcagcagatcaacttcaagaagttcgcggactccaacagcaacctgaccatcttcgagaacctgcccaagacctgcggcgacatcgtgcggaacaacgagctgcccagccacgccaagatcatccagaccagcgccaccgggctgaccgagtgggtgctgttcgaggtgcccgagaacaagagacccgccgccaccaagaaggccggccaggccaagaagaagaaggactacaaggacgacgacgacaagtga

SEQ ID NO: 307 - DNA, 4257 bp, synthetic construct
  source 1..4257: mol_type = other DNA
atggcccccaagaagaagaggaaggtgatgaaggagctgaacctgggcctggacatcgggaccaactccgtgggctgggccctggtggacgagaacggggaggtgatcaagaagaacgggttcaggttctggggcgtgcgcatgttcgacgagagcaaggccgcctccgagcgccggaccaaccggtgctcccggcggcggctgcgccgccggaagcagcggatcgagctgctgcagaacgagttccgcgacgagatcaacaaggtggacgccaacttcttccagcggatcaacgactccttctacaagatcgaggacaagtccatccagaaccactacaccttcttcgacgacttcatgaccgaccagaagtacttcgagaagtaccccaccatctaccacctgcggaagcacctgatcgagaccgacgagaaggccgacatccgcatgctgtacctggccatccaccacatcatcaagtaccgcgggcacttcctgaacgagaacgagaccttcaaccccaccgacatcaacgtgatcgccaccaagatcgacgagttcaacaacatcctggacgagctgtccaacaagaacgaggacgacgtggagtacttcgagaagatcaacaccgagaaggccaacttctacgtgaagctgcaggagatcatgatcgccaagaactccaagaaggagaaggagagcgacctcctgaccctgatggacatcaagaagtccaccctggccgcccagttcttcgtgaacctgctggtgtacggcaagaccagccccaagaagtactccctggtgaaggaggaggactaccaggtgaaggacatcgacttctcctccgacgagtacgagaccgccgtggaggaggccaagaaaaccatcagcgagctgtccgagatcttcgacttcgtggacgaggtgaagagcatcgccgactactactacctgctgaagctcctggggttcaacgagaaaaccaacgagtgcaaccagagcatctccgacgccatgatcaaggtgtacgacacccaccagaaggacctcaaggagctgaagctgctgatcaagaactacctgcccagcaagtacaacgagtgcttccgcctgtacgacgagaagatcaacaactacgtggggtacgtggggcggctgtccaccgagggcaagaccatccgcttcaagcactgctccaaggagacctttgagaagtacatcaagggcctcctggacaacatcaaggacgagaaggtccaggacatcatcctggacatcaagaagcggatcgacaacaacgagtacatgccccggcagaacaacgggcagaacacctccatccccatgcagctcaacctgagcgagctgaaggacatcctcagcaagcagagcaagtactaccccttcctgaaggagtccaccgacggcttcaccaccatcgaccggatcgagaagatcttcacctaccacctgccctactacgtggggccgctgtccaacaacagcaagttcagctgggtggagcgcaccagcgactccatcaagccctggaactacgagaaggtgatcgacatcgacaagaccgccgagaagttcatccagcggatgcagaacaagtgcacctacctgcacggcatcaacgactactgcctgcccaagaagtccctgctgttcagcgagtacacctgcctgcagtacctgaacaagctgaagatcaacgggtccaacatcgacaagaacaccaaggacaagatcttcaacgacttcttcctgaaggacaagagccccaccaagaagcggctcaaggagttcatcagctccaacttcggggaggagtgcaacgatctgcccgagatcacctgcaacatgtcctcctggatcgacttcaaggagatctacaaggaggacttcgacaagaagaaggacaacgagatcgaggagatcatccgggacatcaccctgttcgaggacaagaagatcctcgagaagcggctgaaggaggtgtacaagctgaacgacgacatggtgaagcagatcaagggcttcaactacaaggggtacggcagcatctgccggaacctgctggagctcacctacgagaacgagctgaccggcgaggtgtccgactccatcatcgacgtgatgcggaacaccaacatgaacctgcaggagctgatcctgtccaacaactccaagtaccaggaggccatcgacaagtacaacagcaacatcgacaacaagaacgacatgcagctggacttcaaggagtacatcgacgagaacctgtacgtgagccccatcatgaagcggcccctggtgcaggcctacaagatcatcgaggagatcgagcggatcttcaagcggcccatcgacaagtactacatcgagtgcgcccggaccaaccaggccaagaaggaggccaccaactcccgctacaaccacatcaaggacctgtacgccgcctgctccaaggaggagctgaagtccaaccagatcgacctgggcaacctgcagaagaagctggaggagaaccagaacaagctgcagatcgatgtgatctacctgtacttcacccagctcggcaagttcatgtacaccctgaacaacatcgacttcgactccctgaacaacggggacctgtacgacatcgaccacatctacccccggtccctgatcaaggacgactccatcagcaaccgggtgctggtggacaagaacatcaaccagaacaagaagaacaacctcttcctgtgccagaccgacatcgtgaaggagaagcagcggaagttctacaagctgctggtggacaacaagctgatcaccaaggagaagtaccggcggctgacggagaccaacgtctccgagaacacgctggacggcttcgtgaaccggcagctggtggccaccaaccaggccgtgaagggcctgatccaggtgctcaagaccttcaagaaggtgaagaacagcgacatcatctactccaaggccgagaacgtgagcgacttccggaacgagcacaacttcctcaagacccggaccgccaacaacttccaccacgcccacgacgcctacctgaacgtggtgatcggccgggccctgaactcctactacgagaagaactacatctacaacagcaacgacgtgctgaagatgcagaacgacaaaaagaccctgaacccccagcggatcctgaccttctccaacatcaccgacaagaacggcaactacgtgtgggggatcgacgagtacaccaagaagatcgagaagtacctgtaccacaagtacgacatccacgagaccacccgcacccacaccagcaacgagatgttcagcaagaccagcatctccaaggccggggaggggaccgtgctgatcaagagcaacgacaagaagctgaccatcgagaagtacgggggcatcaagtcctacagctactgcttctactgcatcgtgaaggccgtggacaagaagaacaacaacctgtactgcctcgaggccatccccaccccctacaagaacaacatcgacgcctacatctccaagaagtgctccaacaagtacatctcctacgagatcatcaagaagcagatccccaccaacgtggtggtgaagcagcagaacctgaagtacgtgatcaccggcaagaccaaggacagctacctgatcaagaacgtgaacgaccggttcttctccaagaaggccatcttcaccatccggaagatcgacaagtacttcgagaagagcaagttcaccaacctcgaggagaagaacaacgagatcgagatcgcccccagcaagaagatgaagaacaacaagatgagcaaccccatcatcatcaccaagctggagtgcatcgagctgatcgaggagatcaagaagctgtactccaaggacatctacagctactcccagatcgtgcgcctgtgcgccaccctgcagaacaccaacttcaacgagaacttcaacctgaaggacctgatgtccatcatctaccagatcctgctcctgctcaagaccaacgagcgcaacagcgccgacctgacgatgatcgggctgaagaagagcttcggcatcctgaccatcagcaggctggtgcccaagatgcgcttcgtgagcgagagcatcaccgggtacttcgaggagctgatcttcgaggtgcccgagtgccacctggagatgaagagacccgccgccaccaagaaggccggccaggccaagaagaagaaggactacaaggacgacgacgacaagtga

SEQ ID NO: 308 - DNA, 4206 bp, synthetic construct
  source 1..4206: mol_type = other DNA
atggcccccaagaagaagaggaaggtgatgaacctgcggtccctgtccaccagcgacaagcagtactacatcggcctggacatcgggaccaactccgtgggctgggccgccgtggacgaggacggggacctgctgaagttcaaggggaagaacacctggggctcccggctgttcgactccgcctccaccgccgagaaaacccggagccaccggaccctgcggcggcggtacaaccgccgcctgcagcggatcctggacctccgggccttcctgtaccccgacgtggagaaggtggaccccgacttcttcaaccggatggggcagagcagcctgttcgccgacgacaggcagttcgaggagcagtacgtgctcttcaacggcgtggacttcaacgagaaggactacttcgcccggtaccccaccatctaccacctgcgggaggagctggtgaacaaccccgagaaggccgacatccggctggtgtacctggccctgcaccacatcatgaagtaccgggggaacttcctggtgtccggcgaggtgtccgcccgcaacgtggacgccgagaagatcgtggacgagttcctgaacgagctgtccagcctggccgagcggtacgacatcgccctggacgtggagtccatcgacgccaaggagatcaacgacatcgtgtccctgagcaaggagacccggcaggagcgccagcacaagctgaagaaggtgctggggttccccaaggaggccgacaagctggccacggccctgagcaaggccgtgttcggctacaaggccgacttcagcaagatcttcgaggtgggggaggagaccgagtcctccttcagcctcgggcaggaggacaaggtggagatcttcgagaagtccgccctgctggaggacgacttcggcctgttccgggccctgcagggcctgtacaggtcctacctgctgggcggcatcatcaaggaggcccccggcaggaccatctcctccagcatggtcgccctgtacgagaagcacaaggaggacctcgcccgcctgaaggacctggtgaagaagtacctgcccaaggagaagtaccgggagaccttcaagggccccaagtacgccgggggcacctacaagaaggccgggtccaagggctacaccgcctacctgctgaacaaccacgtgcagaacaagaccccggaggagaccttcttctcctacctggggtccctgttcaagaacgtggagatggacccggaggaccgggagtactgggacgacgccctgaagcggatgtccgagggcgagtacctgcggaagctgcggatgtccgacaacggggccatcccccaccagctgcacggcgaggagctgaagctgatcatcgagaaccagtcccagtactacccgagcctggccgagaacggcgagaagatcgaggccctgttctccttccggctgccctactacgtggggcccctggggtcccagaacaaccccaaccgggccaagcccttcagctgggcggtccggaaggagaacgcgccccaggagcccatcaagccctggaacttcgaccagatcatcgaccgggacgccaccgccgaggccttcatcaacaacctgaccgggacctgcacctactacctgggcaagtccgtgatccccaagtacagcctgctgtacagcgagttctgcgtgcggcaggagctgaacgtgtgcaaggccgccatcgacggcgagaagttcaaccggttcgacgtcaagaccgccaacgagatcttcgagggcgtgttcaagcggaagaagaaggtgtccatcaaggacgtctccgacttcctcaagaccgagctgggcatgttcaacgtgaccgtgaccggcacgcaggacgagaaggggttcgccagcagcctgacctcctacaacgacttcaggcggatcctggggcgcgagatcgagaccgcctccgactgcgagatggtggagaagctgatcacctgggtgaccgtgttcgaggacaagaagatcctccggcggaagatcacccagacctacggccccgaggccaccggggagctcaccaacgagcagatcaaggccgtgaccaagctgcggtacaccggctggtcccggctgagccgggagttcctggaggacctgcgggtggactacgagggcacctacgtgtccatcatggacatcctgcgggactcccggaactcccggcggcccatgaacctcatggagatcctggccgacgagcggttccacttccagaacctgctcgacgaggccaacaaggagttcctggacgccgcctacggcaccgccctggactccatccccgggagccccgccctgaagcggggcatcaaccagagcctcaagatcgtgcaggagatcgtgcagatcgcggggaagagccccgccaagatctgcgtggagatggccaaggaggacgtgggcaagaccaagggcaagcggacccggacccgccagcggcacatcgaggagtgcatcaacgccaacgtggaccagatcgtgaaggggatcaaggactccgaggagctcaagaaggagctccgggagaacgccgaccggctggacgagaccaagctgtacctgtacttcctgcagggcgggaagtgcctgtacagcggcgatcccctggagatcgacgagctggagaactacgacatcgaccacatcatcccccggtccctggtgaaggacaactccatcgacaacctggccctggtgacctccgagtgcaaccgcaccgagaagcgggacgtgtaccccctccccgaggccatccggcgccggcggctgggcgtgtggcgcgccatgcggcgcgtgggcatgctcagcgagaagaagtacgagcggctgacctgcgccaacgtgagcgacaagcggttccagcacttcatcaaccggcagctggtggagacccggcagatctccaagcaggtggtggccctgctgcagagccagtaccccgacagcaaggtggaggggatcaaggccgggctcaccagctccctgcgcaagacctacgggttccacaagagccggctggtgaacgacttccaccacgcccacgacgcctacttcgcctgccaggtgagccggttcatcagctgccggttccccacgatgggggagggcctgacctacgccgccttcacccggtacgacgccatcatggccaaggagcgctactccaaggtggggctggtggccagccagttcggccgggacggcttcgaccggaacaccggcgagatcatcaaggacacctgggacgcccagttcgagctggagcggatccggaagtgcctgaactacaaggactgcttcatcagccgcaagaccgaggtgctgagcggcgagttctggaagcagaccatcctcagcccccggatgaaaaccgagaaggccatcccgctgaagaaggacctggaccccgtgaagtacgggtactacaagtcccccaacagcgccttctacaccctgatcaagtgctccaagaccctgcggaagaaggaccgcaccgtggtggagctggtgggcatccccatcaacgtggccaaccggatcaactccaccgaggacctgcagaagtacctggagaccaggtacaacaagcccttcatcatccgggagcggatccccaagtaccagctgatcgagtgggacgggcaccggtactacctgaccagccagtccgagatgatcaacgcctggcagctgtggctgcccgagcagtacatcgggagcctggaggagatcgagccgccccggaacgagggcaaggtcctgcccgaggagaccaccagggccatctgggccctgctgatcaaggccgtggagaagaacccccggtacaaggacaacctggccatcaagctgaagtccgactccatccggcggaagttcgaggaggcctcccccaaggagaagcagaagaacgtgctgcagctgatcgccctgctgcactgcaacgccgacagggggatcagcctggtgtccaccagcgccgggcgcatgaacagcgtgagcttcgagtccaactacaagcacatccagttcgtggacaccagcgtgaccggcatgtacgagcgccggaccaacatcgagctgaagagacccgccgccaccaagaaggccggccaggccaagaagaagaaggactacaaggacgacgacgacaagtga

SEQ ID NO: 309 - DNA, 4185 bp, synthetic construct
  source 1..4185: mol_type = other DNA
atggcccccaagaagaagaggaaggtgatgaaggggatcatcatgaacgccaagcggtccgagtactacatcgggctggacatcggcaccaacagcgtgggctgggccgtggccaaccccgactacaccatccccaagttccacggccacaagatgtggggctcccggctgttcgacgaggccatgaccgccgaggagcgccgggtgcaccgcaccaaccggcgccggctgaaccggcgccgggaccgcctgaacatcctgcaggacctgttcaaggacgagatcgcccaggtggacaacaccttcttcctgcgcctgaaggagagcaagttctacctggaggacaaggacgaggcgatcaaggacaagaacatcctgttcagcgacctgaagttcaccgacaaggacttctacaagaagtacaagaccatctaccacctgcggaaccacctgatgaacgagtccccggacgacatccgggagctgtacctggccatccaccacatcctgaagtaccggggccacttcctgctgtccggggacctgggcatcagcaacgagagcatcgccgacagcctggagtccatcttcgtgaacctggacatcctgcagcccggcgaggagttcgatctgaacctgatcgactccatcctgaagaaccgggacaagaccaagagcgacaggcgcaaggccgtgaagaaggtggccgaggagcactgggagagcaacaagaaggagcagtccgtgaagaacaagatcgcccagatcgacaacatcgccgggctggccctcggcctgaaggccgacctgtccaagctgctgaacgtgcccgagtacaccgacctggagaaggcctacaaggagatctgcttctccaagggcgactacgaggagaagcggggcgactacgagctgtccatcggcgagtacatcaagatcatcgaccagatcaagaccgtgtacgacagcatcatcctgtcctccgtgctgaaggactacgccaccatcagcgaggccaagatcgccgactacgaggcccaccaggacgacctgcagcacctgaagaagctgctgaagcccaccccctccctgtacaacgccatgttcagggacgacagcaacaagtccctgaacaactacgtggcctacatcggggcctacaccaacgggaagcggacctccaccgaggacttctacaagttcgtgaagaagtccctggccgagctggaggacagcgtggagaaggagcgcgtgctgaaccgcatcggcctggagcagttcatgcccctgatgcggtccaagaacaacgcctccatcccctaccagatccacaaggtggagctgatccagatcctggagaaggccgcctccaagttccccttcctgaacgacgtgaaggacggcctgagcgtgaaggagaagatcatcgagctgttcgagttccggatcccctactacgtggggcccctgaacaacagcaactccaacaacgcctgggtggtccggaagtccaccgggaaggtgtacccctggaacttcaacgagaagatcgacgagaaggcctccgccgaggccttcatcaacaacctgaccaacaagtgcacctacctgatcggggaggacgtgctccccaagaacagcatcctgtacagcaagttcagcctgctgaacgagctgaacaacatccggatcgacgggcagcccctgcccgtccaggtgaagcaggactacatcgacaccatcttcaagaaggagcacaagaagcagaccaagtcccgcatcctggacttcctgaagatctccggcctgatccccaacagcatccccgtgtccgtggtgaccgggctggacgactccatcaagtccgacctgaagtcctaccgggacatggagaagatcctgggggagggcttcgacatcagcgtggccgagaacatcatccgctgggtcacgctgttcggcgaggccaagcggatcctggtggacaagatccgcgagaactacccccagatcaccgacgagcagatcaagaagatcaagaagctgaagtacagcgactgggggaagctgagcaacaagttcctgctgaagatcaagtgcatcacccccgagggggacgagaacagcatcatcgacaccctggagaacaccaacctgaacctgatgcagatcctggccatcaagagctgccagaagaacatcgagctgtggaaccaggagcacaccgagaacaaggagtacaagaccgagtacgacctcctggacgacctgtacatcagccccgccgtgaagcggagcgtgtggcagtccctgaagatcgtggacgagctggtgcggatcaacgggtccatccccaagaagatcttcgtggaggtgacccggaccaacaaggccgagaaaaccaagaaggacgcccggcagaagcggctgctggacctgtaccaggccatcgggaaggagggggccgagtggaaggagcagatcctgaactacaacgccggggacttccggagcaagaagctgtacctgtactacacccagatgggccggtgcatgtacagcaacgagctgatcaacatcgatcggctcttcaccaacgactacgacatcgaccacatcttcccccggtccgtgaccaaggacaacagctgggacaacctggtgctcgtgaagtccgtggagaaccgcaaaaagacggacacctaccccctgcccatcgagctgcagaaccgcaacaaggagtggtggcgcatgctgcgccagtactccttcatcagcgagcggaagtacgagcggctggtgcggaaggaggagctgaccgtcgaggagctgtccgggttcatcgcccggcagctcgtcgagacctcccagagcaccaaggccgtgacccagctgctgaagaagatctaccccgacaccgagatcgtcttcagcaaggccgagaacgtgagcgagttccgctacaagaacaacttcgtgaaggtgcgcgagctgaacgactaccaccacgccaaggacgcctacctgaacatcgtggtgggcaacgtgtaccacgagaagttcacgaaggacccctccaactacatccggaacgtgtacgaccggttcaacagcatcaacgaccggcggaagcgcctgtccatgaaccacatcttcgtgcacaagctggagcggcacaacaccaccatctgggaccccagcatctccatgcccatcgtgatcaagatgatggagagcaacgacgtgcgggtgacccgcaagctgaccatccagaagggggtgctgtacaacgccagcatcaccaaggccaacaaggccaagttcgacagcaacttccccctgaagcggggcgaccagcggctgctggacgtgagcaagtacggcgggtacgagaacatctacaacgcctactactccgtgttccgcttcatcgacaccaagctgaagaaggagagcgtgaacctgatcgccatccccatctacgtgctgaactccctgaacagcaacgacgactacatcctgtacgccaagtccaccatcagcaaccggaacaactacgaccagatcgagctgctgtacaagaagctgcccatcaacagcctggtgcggatcaacggcttcgactactacatcggcggcaagaccaacaacaacgtgtgcatcgacagcgccatcagcgtggtgctgaacagcagcgacctgctgtacctgaagtccatcatccgggtggtgaacagcgacatccccgagcacgtgttcaagatggacgacagcctgagcaaggacgccaacctgcggttctaccgcagcctggtgtccaagatgaagcagagcatcttcatcaagaagagcaagaacaagttccgggagctggagcaggacagctgcatctgcaagttcatcaccctgaccgagatcgagcagtgctacgtgctgctcgacctgctgaacatgctgaccaacaaaaagaccacctacgacaagctgaacaagtgcctgggggtcagcatgagcaggtccacccaggggatgaacctgagcaacctgaacgagttcaccatcaaggagcagtccgtgaccgggctgtactgcaaggacgtgaagctgatcaagagacccgccgccaccaagaaggccggccaggccaagaagaagaaggactacaaggacgacgacgacaagtga

SEQ ID NO: 310 - DNA, 4143 bp, synthetic construct
  source 1..4143: mol_type = other DNA
atggcccccaagaagaagaggaaggtgatggaggactggtacctgggcctggacatgggcaccaactccgtgggctgggccgtgaccgacgaggcctactgcctgctgcggaagaagggcaaggacctgtggggcgtgcggctgttcctggaggccgagaccgcccagggccggcgctccaaccgggtgtcccggcggcggcgccgccgggagaccgtgcggatcggctacctgaaggagctgttctccgaggccatcagccaggtggacgccggcttctaccagcgcctggaggacagcaagttcttccaggaggacaagcgggagcaccagcccttcgccctgttcgccgacaccgcctacaccgaccgggactacttcaaggagtaccccaccatctaccacctgcggcgggagctcctgtacagcaaggagccccacgacgtgcggctggtgtacctggccgtgctgaacatgttcaagcaccggggccacttcctgaacgccaccctgtccgacgggaacgggggcaacatcaaggagctgtacggccagctgcaggaggggttctccgagctgtacgacaaggagatggccgccatccgggacgccgaggagctgcagaagctcctgaccgacaagaagtacaccaagtccgggcgggccgaggaggtgcggaagtacctcaacatcgacaagaaggacaaggcccagtgcgagatgtggaagctggtgtgcggcctgcaggccaccctgcccgtgatcttcgagggcgaggagttctccgaggagaacctgaagtacaagctgtccttcgacgacggcaagtacgaggagaaggccgccgaggtggagggcatgctctccgaggacgccttcgagctgttcctgctgctgaagcagatccacgacggggtgatcctgtccgacatcatggagtcctaccactacctgtccgaggcccgggtggccagctacgagaagcacaaggaggacctgaagcgcctgaagaagatctacaggctgtacgcccccgaggagtacgactccatgttccggacgatggaggacaacaactactccgcctacgccggcagcttcctgaccggcggcgagaagcagcgccggggcgggaagcacaagaccgaggagttctacgcccggctgaagaagaagatcgtgaccttccccgagaccggggactcccggtacgtgctggacgagatcgagaagggcaccttcctgcccaagcagctgaccgcctccaacggggtgatccccaaccaggtgcacctggccgagctgaagaagatcctggagaacgccgagaactacctggagttcctcaagaccaaggacgagggcggcctgaccgtctccgagaagatcatccagctgttctccttccagatgccctactacatcgggcccctgatccagacggagaacaaccacgcctgggtgaagcggaaggagatgggcaaggtgtacccctggaacctggagcagaagatcgacgtgaaggagaccgccgaggccttcatctacaacctggtgaaccactgcacctacctgagcgacgagcgggtcctccccaagaactccctgctgtacgagaagttcatggtgctgaacgagctgaacaacctccggatcaacggggagaagatctccgtggagctgaagcaggagctgtaccaggccctgttcaagaacggcaagaaggtgaccggcaagcggatcaagacctacctgctgaaccgggggtacgtgtccaaggagatgcccgtggagctgaccggcatcgacggggactgcgtgaaccgcctggccaactacaagaagttcctggagatcttcgaggtcgacaccctgacctacgcccaggagcagatggccgagcagatcatctactggtccaccgtgtacggcgacagccggaagttcctgggcgacaagatcgaggaggagtacggcaaggtgctcacccccgagcagaagaagcggatcctgggctacaagttcaaggactggggccggttctcccgggagttcctgttcctggagggcgccgacaaggagaccggcgagatcgacaccatcatctcccggctctggaacgagaactacaacctgatgcagctgctgggggacgagctgttcacctacaaggaggagatcgagaagcgggtgcagaagatcgacaagaccctcttcgagatcgagtacgaggacctccaggagctgtacatcagcgcccccgtgcggcggatgacctggcagaccatcctgctgctgcgggagctgtgctccgtgatggggagctaccccaacaaggtgttcgtggagatggcccgcgagcaccaggaggacaagaagcgcaccgtgtccaggaagaggaagttcgaggagctgtacaagaagtgcaagggggaggagcgcgagtggctggccgagatctccgggaccgaggagtcccggttccggagcaagaagctgtacctctactacacccagaagggccggtgcatgtacaccggcgagcagatcgagctgagcaacctgttcaacgacaacctgtacgacatcgaccacatctacccccggcacttcgtgaaggacgacaacatcgacaacaacctggtgctggtgaagaaggagtccaacgcccacaagcgggacgtgttccccctggagcccggcatccgggagaagcagaacgacctgtggaagatgctgctggagggcggcttcatcaccaaggagaagtacttccggctgacccggaacgaccccttcacccccgaggagcaggccggcttcatcagccggcagatcgtggagacccggcagggcaccaaggccatcgccgacctgctccagaaggggtgccccgacagcgacgtgatctacgtgaaggccgggaacgtgtccgacttccggcacgagttcaacctgatcaagtgccggaacgtcaacgacttccaccacgcccaggacgcctacctgaacatcgtggtgggcaacgtgtacgacaccaagttcaccaagagcccccggcgcttcatcgaggcctaccggaaggaccccgagcacaacaagtaccacatggacaagctgttcgacttcgacgtgaagcgggggaacgtggtggcctgggaggtggggaagtccatcggggaggtgaaaaagaccttccggaagaacagccccctggtgacctacatgaactacgaggcccacgggggcctggccgaccagaccctgtacagcgccaaggccgccaagctggccggcggcgaggggtacatccccctgaaggccagcgacgagcggctgaaggacaccacgaagtacgggggcttcaagaagtacaccgggtgctacttcttcgtggtggagtacaccgtgaaggggaagcgcatccggagcatcgagaacatgcccctgtacctgaagaaggagctgaactcccgggagaagctggagcagtactgcatggaggtgctgaagtacgccgagcccgagatcatctgcgagcggatcaagatgtactccctgatgaagatcaacgggtactacgcctacctgtccggccggaccggcaaccagctgatcctggtgaacgccgtgcagctggtgctgtcctacgactggatgctctacgtgaagcggatcaacgacgccgtggagcgcgggtactccgaggagcagctggagtaccagggcgagatcacccgcgagcagaacctgaagctgtaccgggagctgaccggcaagcacatgggcaccatctacgggaagcggcccaacggcatcgggaagttcctggtggagaacgaggagaagttcgagatgctgagcatccagcagcagctgtccgccctgctggagatcctgaaggtgtcccagcggacctccggcggggtggacatgacgatgctgggcggggccaagaaggccggcgtgtccctgatctccaagaagatcagcgacctgaaggagtgcaaggtgatccaccagtccgtggccggcctgtacgtgtccgagaccgacctgctgagcctgaagagacccgccgccaccaagaaggccggccaggccaagaagaagaaggactacaaggacgacgacgacaagtga

SEQ ID NO: 311 - DNA, 4047 bp, synthetic construct
  source 1..4047: mol_type = other DNA
atggcccccaagaagaagaggaaggtgatgtccgagtactacatcgggctggacgtggggaccaactccgtcggctgggccgccaccgacaccgcgtacagcctgctgaagtaccggggcaacgccatgtggggcgtgcggctgttcgacgacgccaacgacgcctccgagcggcggagcagccgcaccgcccggcggctgcacgcccggagcaagcagcggctggccctgctggagctgctgttctccgaggcgctggccgagaaggaccccctgttcctgacccggctggccgagtccgccctgcaggagcaggaccggtcctccgccagctgccggtacgccctgttcaacgaccccgacttcaccgaccgggagtacttcaagcggtaccccaccgcctaccacctgcggagcgagctgatccacagcaccgctccgcacgacatccggctggtgtacctggccctgcaccacatcgtgaagagccggggccacttcctgttcgacatggacacggacggggagtacaagggcgtgcgggagatcttcgacgagctgtgcgtgctgctggaggagcagtacgacacagcctgccccgtgtccgacaccgacgccttcctggagctgctccagaacgactccatgggcatcaccgacaagaagaaggccctgaagcccctggtgggcaagaacgccgccgacatggtggacggctacgtgctgtgctgcgccctggtgggcgccacagtgaagtgcgccgacctgttctgcgacgagaccctgaaggacgtcgacatccccagcctgcggctgcgggacgacctggacgagaactacgaccggttcgccgacgccctgagcgaccggatggacctggtcgtggccatgaaggcggtgttcgacgccgccctgctgtcgaagatcctgggcaaggccgcccacaccggcgacgagaccgcctacatctccgacgccaaggtgcagcagttcgacgagaaccgggccgacctggccctgctgaagcggtacgtgcggtccgcctgccccgagaagtacggctacatcttccggaagaagaaggacaagctgaacaacttcgccgcctacggcaagcggagcatcgccagcggcgagtacacctgcaagcaggaggacttctgcaagttcctgaagaaggagctgcccgcccccagcgaggcggcctacgccgccctgttcgccaagatcgagaacggcaccctgctgcccaagctgcggggcgccgacaactccgtgatcccccaccagctccactaccgggagctgaagaagatcctggagaacgccgccggctacctgcccttcctgcagcaggccgacgccgacggcctgaccgtgacggacaagatcctgagcatcttcagcttcaggatcccctactacgtggggcccctgaacctgaagagccccaacgcctgggtcgtgcggaccgaggagaagatcaccccctggaacttcgagaaggtggtcgacacccagaagtccgccgagtccttcatgatcaggctgatcggcaagtgcacctacaccggcgaggccgtcctgcccaaggacagcctgctgtacagcgagttcgccgtgctgaacgagatcaacctgctgtgcctgaacggcacgcccctgcccgccgacatcaagaaccggctgttccaggacctgttcgtgcagagcaacgcccgcgtgaccaagaagaagatcaagcagtggctgctcatgcacgggctggccaaggagaccgacgaggtgagcggggtggacaacatcatcaaggccaacctgaagtcctaccacgacttcaagaacatcctgtgcaaggtgccccacgccgagatcgtggaggacatcatcaagcacatcctgatcttcggcgaggacaagaagatgctccgccgctggctgaaggccagctgccccttcctggacgagcaggacaccgcctacgtgctgcggctgcggtacaaggactgggggcggctgagccggaccttcctgaccgagatctacacccccgacgagaacggggaggccctgagcgtgatggacatgctcagggccaccaacaagaacctgcagcagctgctgaccgacgactacgacttcgccaagcaggcggaggagtaccggtccctgaagttcggggtcggcggcagcctggacgagcagctgcaggacctgtacatctcgccccggatccaccggagcatccggcagaccctgaagatcgtgaaggagatcaccgccgccgagaagtgcgcccccaagaagatcttcctggaggtggcccggggcaccaaggaggacctgaagggcaagcggaccgtgagccgcaaggacaacctcctgcagctgtacaaggcctgcaaggaggagcacggcgagctggccgccgccctcgccgccgaggacgagggccggctgcgcagcgacgccctgtacctgtactacacccagttcgggaagtgcatgtacagcggcgagtccatcgacatcaccaagctgaagtccgactacgacatcgaccacatcttcccccagagccgggtgaaggacgacagcctggacaaccgggtgctggtgaagcgggagctgaacaacgacaagaagaacatctaccccatcagcgccgacatccggaccaacatgcagcccttctggcacatgctgaaggagaaggggctgatcagcccccgcaagtacgagcgcctggtgcggaacaccccgctgaccgaggcggagctgtccgccttcgtgtcccggcagctggtggagaaccggcagtccaccaaggccctggccaccgtgctgaagcggtactaccccgacacccggctggtgtacagcaaggccatgaacgtgagcgacttccgccacgagcaggagctggtgaagtgccgggacatcaacgacctgcaccacgccaaggacgcctacctgaacatcgtggtgggcaacgtgtacgacaccaagttcacggccgccttcttcaagaacatcctgaccgaggagtacagcctgaacaaggtgttcgagcgcgacgtgcggggcgcctggcagaaggagcgcgacctggccaaggtgcgctccgtgatgaagaagaacaacatcctggtgacccgcatgccccacgagaagaaggggaagctgttcgacctgcagatcctgcccaagggcaagggccagctgcccgtgaaggtggaccggtccatcgagaactacggcggctacaacaacgtgagcggggcccactccatcgtggtggagcacgacggcaagaagggccgcgtgcgcaccatcgagcccgtgtacatctaccagaaggccctgtacgagcaggaccccctgcggtactgccgggagatcctgggcctgagcgagcccaagatcgtggcggaccgcatcctgttcgacaccctgctggagctgaacggcaagcggatctacatcaccggccggtccgggaactacctgtgcggcaagcacccctaccagctggccatcgacagcgacagcgagaaggccatcaaggacatcaagaagtacgtggaccggtgcgccgagaagaaggccgtgctgcccatcaccgagcacgacggcatcagcgccgagaccaacctgcggctgttcgacctgttcatcgccaagttccacgcccccgtgtacgccgcctacttcaccaacctgtgcaacttctgcgagcagcaccgggaggacttcatcgccctgacccccgacgcccagtgccacctgctgctcgagatcctgaaggccttcaagtgcgaccgcaccgccagcgacctgagcgtgctgggcggccccaagaacgccggcatcctgatgatgtccaagaccatcagcacctgccggaccgcctacgtgatccaccacagccccagcgggctgtacgagaccaaggtggatctgctgcggcccaagagacccgccgccaccaagaaggccggccaggccaagaagaagaaggactacaaggacgacgacgacaagtga

SEQ ID NO: 312-340 - skipped (29 entries)

SEQ ID NO: 341 - RNA, 34 nt, synthetic construct
  source 1..34: mol_type = other RNA
gtttcagtatagcaaaaattatgagggtactaaa

SEQ ID NO: 342 - RNA, 36 nt, synthetic construct
  source 1..36: mol_type = other RNA
gttttgttaccatatggatttttgctagaatgaaac

SEQ ID NO: 343 - RNA, 36 nt, synthetic construct
  source 1..36: mol_type = other RNA
gttttggtttggtatcattcttatgtagtataaaac

SEQ ID NO: 344 - RNA, 36 nt, synthetic construct
  source 1..36: mol_type = other RNA
gtttaattgcagtaataaatgttaatagatcaaaac

SEQ ID NO: 345 - RNA, 36 nt, synthetic construct
  source 1..36: mol_type = other RNA
gtttgagaatgatgtaaattagtatggtactcaagc

SEQ ID NO: 346 - RNA, 24 nt, synthetic construct
  source 1..24: mol_type = other RNA
agtttggcaatgatgtaaaacgga

SEQ ID NO: 347 - RNA, 36 nt, synthetic construct
  source 1..36: mol_type = other RNA
gttttagctcagtgtaattttagacagtaatgaaac

SEQ ID NO: 348 - RNA, 36 nt, synthetic construct
  source 1..36: mol_type = other RNA
gtttgagaatggtgtaaaaatgtatggtactcaaac

SEQ ID NO: 349 - RNA, 36 nt, synthetic construct
  source 1..36: mol_type = other RNA
gtttgagagtaatgtaatttcataggggtctcaaac

SEQ ID NO: 350 - RNA, 36 nt, synthetic construct
  source 1..36: mol_type = other RNA
gtttcttacccctcttaacttacaaggttctcaaac

SEQ ID NO: 351 - RNA, 36 nt, synthetic construct
  source 1..36: mol_type = other RNA
gtttgagaaccttgtaagttaagaggggtaagaaac

SEQ ID NO: 352 - RNA, 36 nt, synthetic construct
  source 1..36: mol_type = other RNA
gttttacacttatcataatttacaaggttctcaaac

SEQ ID NO: 353 - RNA, 36 nt, synthetic construct
  source 1..36: mol_type = other RNA
gttttggagcagtggcgaaccgactggtagtcaaac

SEQ ID NO: 354 - RNA, 36 nt, synthetic construct
  source 1..36: mol_type = other RNA
gttttagtatcatacgattttacactactctcaaac

SEQ ID NO: 355 - RNA, 36 nt, synthetic construct
  source 1..36: mol_type = other RNA
gattgagacccctaagaaataacactgctctcaaac

SEQ ID NO: 356 - RNA, 36 nt, synthetic construct
  source 1..36: mol_type = other RNA
gtttgagagatgtgttatttctaataggtcttaaac

SEQ ID NO: 357 - RNA, 36 nt, synthetic construct
  source 1..36: mol_type = other RNA
gtttgattaccagtcagaatgacactactccaaaac

SEQ ID NO: 358 - RNA, 36 nt, synthetic construct
  source 1..36: mol_type = other RNA
gttttggagcagtgtcattttgactggtaatcaaac

SEQ ID NO: 359 - RNA, 36 nt, synthetic construct
  source 1..36: mol_type = other RNA
gtttgattaccagtcaaaatgacactgctccaaaac

SEQ ID NO: 360 - RNA, 36 nt, synthetic construct
  source 1..36: mol_type = other RNA
gttttagttctatatgaaattacactattctcaaac

SEQ ID NO: 361 - RNA, 36 nt, synthetic construct
  source 1..36: mol_type = other RNA
gtttgagagtcgtgtaatatcatcgtgtgactgaac

SEQ ID NO: 362 - RNA, 36 nt, synthetic construct
  source 1..36: mol_type = other RNA
gtttgagagtcgtgtaatattatcgtgtaactgaac

SEQ ID NO: 363 - RNA, 37 nt, synthetic construct
  source 1..37: mol_type = other RNA
gtttcagtcctcagaaccattaagtttttattgtagg

SEQ ID NO: 364 - RNA, 36 nt, synthetic construct
  source 1..36: mol_type = other RNA
gtttgagacctgttcaaaactacatcactctcaaac

SEQ ID NO: 365 - RNA, 36 nt, synthetic construct
  source 1..36: mol_type = other RNA
gtttgagagttatgttattctagataccactaaaac

SEQ ID NO: 366 - RNA, 36 nt, synthetic construct
  source 1..36: mol_type = other RNA
gttttaaatctatgtcatcttaaatggtattaaaac

SEQ ID NO: 367 - RNA, 36 nt, synthetic construct
  source 1..36: mol_type = other RNA
gtcttagtctaacaaaaatccatatggtaacaaaac

SEQ ID NO: 368 - RNA, 36 nt, synthetic construct
  source 1..36: mol_type = other RNA
gttttagatctatgttatcttgaatggtattaaaac

SEQ ID NO: 369 - RNA, 36 nt, synthetic construct
  source 1..36: mol_type = other RNA
gttcagcaacacgatgatattacacgactctcaaac

SEQ ID NO: 370 - RNA, 36 nt, synthetic construct
  source 1..36: mol_type = other RNA
gttttagatctgtgtcatcttgaatggtattaaaac

SEQ ID NO: 371 - RNA, 36 nt, synthetic construct
  source 1..36: mol_type = other RNA
gtttgagaaccttgtaagttaggaaggatataaaac

SEQ ID NO: 372 - RNA, 36 nt, synthetic construct
  source 1..36: mol_type = other RNA
gctatacttacttcctaaacaacaaaactctcaaac

SEQ ID NO: 373 - RNA, 36 nt, synthetic construct
  source 1..36: mol_type = other RNA
gtttgagagcattgttgttttgtaaaacactgaaac

SEQ ID NO: 374 - RNA, 36 nt, synthetic construct
  source 1..36: mol_type = other RNA
gtttgagagtcttgtagtttcataagcagttaaaac

SEQ ID NO: 375 - RNA, 36 nt, synthetic construct
  source 1..36: mol_type = other RNA
gtttgagaatgatgtaaaaatgtatggtactcaaac

SEQ ID NO: 376 - RNA, 36 nt, synthetic construct
  source 1..36: mol_type = other RNA
gtttgagagtcttgttgtttcataagcagttaaaac

SEQ ID NO: 377 - RNA, 36 nt, synthetic construct; identical to SEQ ID NO: 375
  source 1..36: mol_type = other RNA

SEQ ID NO: 378 - RNA, 35 nt, synthetic construct
  source 1..35: mol_type = other RNA
ttttagtacctgtagtaactgggttatcgaaatct

SEQ ID NO: 379 - RNA, 20 nt, synthetic construct
  source 1..20: mol_type = other RNA
aaaatgtcagagaaataaaa

SEQ ID NO: 380 - RNA, 37 nt, synthetic construct
  source 1..37: mol_type = other RNA
gtttcaaactaagttgacttatgatatgatttgttat

SEQ ID NO: 381 - RNA, 32 nt, synthetic construct
  source 1..32: mol_type = other RNA
gtttgagaaccttgtaagttaagaggggtaag

SEQ ID NO: 382 - RNA, 36 nt, synthetic construct; identical to SEQ ID NO: 375
  source 1..36: mol_type = other RNA

SEQ ID NO: 383 - RNA, 36 nt, synthetic construct
  source 1..36: mol_type = other RNA
gtttgagagttgtgcaatattatcgtgtaactgaac

SEQ ID NO: 384 - RNA, 38 nt, synthetic construct
  source 1..38: mol_type = other RNA
agtttcaaattaagttttgtttcgatataatgtgccac

SEQ ID NO: 385 - RNA, 25 nt, synthetic construct
  source 1..25: mol_type = other RNA
gtttgtgatgtgtgttgtttgttcg

SEQ ID NO: 386 - RNA, 35 nt, synthetic construct
  source 1..35: mol_type = other RNA
gtttgagagtagtgctatctttaactattttcaaa

SEQ ID NO: 387 - RNA, 32 nt, synthetic construct
  source 1..32: mol_type = other RNA
gtttcagttgctgagtagtcggttatattggt

SEQ ID NO: 388 - RNA, 33 nt, synthetic construct
  source 1..33: mol_type = other RNA
gtttgagaatgatgtaatcttgtataggtatta

SEQ ID NO: 389 - RNA, 36 nt, synthetic construct
  source 1..36: mol_type = other RNA
gtttgagagtagtgtaaatttataggggactaaaac

SEQ ID NO: 390 - RNA, 35 nt, synthetic construct
  source 1..35: mol_type = other RNA
gttttgttaccagcaaaattcacatagctctcaaa

SEQ ID NO: 391 - RNA, 36 nt, synthetic construct
  source 1..36: mol_type = other RNA
gtttgagagctttgtaaatcagaaaaggtaacaaac

SEQ ID NO: 392 - RNA, 26 nt, synthetic construct
  source 1..26: mol_type = other RNA
ttttggtcctattcaaaactacatgg

SEQ ID NO: 393 - RNA, 36 nt, synthetic construct
  source 1..36: mol_type = other RNA
gttttagagccatgtagttttgaataggaccaaaac

SEQ ID NO: 394 - RNA, 36 nt, synthetic construct; identical to SEQ ID NO: 393
  source 1..36: mol_type = other RNA

SEQ ID NO: 395 - RNA, 36 nt, synthetic construct
  source 1..36: mol_type = other RNA
gttttagatctatgttatcttaaatggtattaaaac

SEQ ID NO: 396 - RNA, 34 nt, synthetic construct
  source 1..34: mol_type = other RNA
gttttggagcagtggcatcccaactggtaatcaa

SEQ ID NO: 397 - RNA, 36 nt, synthetic construct
  source 1..36: mol_type = other RNA
gttttggagcagtggcatcccaactggtaatcaaac

SEQ ID NO: 398 - RNA, 33 nt, synthetic construct
  source 1..33: mol_type = other RNA
gttttggagcagtggcatcccaactggtaatca

SEQ ID NO: 399 - RNA, 23 nt, synthetic construct
  source 1..23: mol_type = other RNA
tgtttgagagccttgtaaatcaa

SEQ ID NO: 400 - RNA, 34 nt, synthetic construct
  source 1..34: mol_type = other RNA
ttttagtacctgaaagaattgagttatcgtaaaa

SEQ ID NO: 401 - RNA, 34 nt, synthetic construct; identical to SEQ ID NO: 400
  source 1..34: mol_type = other RNA

SEQ ID NO: 402 - RNA, 33 nt, synthetic construct
  source 1..33: mol_type = other RNA
gtttgagagttttgtaaattatgataggtgtta

SEQ ID NO: 403 - RNA, 33 nt, synthetic construct; identical to SEQ ID NO: 402
  source 1..33: mol_type = other RNA

SEQ ID NO: 404 - RNA, 33 nt, synthetic construct
  source 1..33: mol_type = other RNA
gtttgctaagtgtgttaaataagacgggtccta

SEQ ID NO: 405 - RNA, 35 nt, synthetic construct
  source 1..35: mol_type = other RNA
gtttgctaagtgtgttaaataagacgggtcctatg

SEQ ID NO: 406 - RNA, 36 nt, synthetic construct
  source 1..36: mol_type = other RNA
tttcagttgctaggtgatgggttatactagtgagtg

SEQ ID NO: 407 - RNA, 37 nt, synthetic construct
  source 1..37: mol_type = other RNA
gtttcagttgctaggtgatgggttatactagtgagtg

SEQ ID NO: 408 - RNA, 32 nt, synthetic construct
  source 1..32: mol_type = other RNA
gttttagaacgatgtagtttcatatggtagca

SEQ ID NO: 409 - RNA, 36 nt, synthetic construct
  source 1..36: mol_type = other RNA
gttttgttaccatctgaattattgctagaacacaac

SEQ ID NO: 410 - RNA, 30 nt, synthetic construct
  source 1..30: mol_type = other RNA
gttttgttaccatctgaattattgctagaa

SEQ ID NO: 411 - RNA, 35 nt, synthetic construct
  source 1..35: mol_type = other RNA
agggatacgttaccttgttttacattactctcaaa

SEQ ID NO: 412 - RNA, 29 nt, synthetic construct
  source 1..29: mol_type = other RNA
ttctatgacatctttaatggtattaaaac

SEQ ID NO: 413 - RNA, 31 nt, synthetic construct
  source 1..31: mol_type = other RNA
gcttgagtgtattgtaaaatcagattcatct

SEQ ID NO: 414 - RNA, 33 nt, synthetic construct
  source 1..33: mol_type = other RNA
gttttggagcagcgacgttctgagtgagagcaa

SEQ ID NO: 415 - RNA, 36 nt, synthetic construct
  source 1..36: mol_type = other RNA
gtttgagagtaatgtaattctataaatactcttaat

SEQ ID NO: 416 - RNA, 27 nt, synthetic construct
  source 1..27: mol_type = other RNA
gtttgagagctttgtaaatcagtaagg

SEQ ID NO: 417 - RNA, 31 nt, synthetic construct
  source 1..31: mol_type = other RNA
gtttgagagtagtgtaaattcagatggtact

SEQ ID NO: 418-430 - skipped (13 entries)

SEQ ID NO: 431 - RNA, 117 nt, synthetic construct
  source 1..117: mol_type = other RNA
gtatggtactcaagcgaaagcttgagtatcagaacgttaaatctgatgggatttatcttcttgaactgtaatttggggttgtttgagaatgatgtaaattagtatggtactcaagcc

SEQ ID NO: 432 - RNA, 135 nt, synthetic construct
  source 1..135: mol_type = other RNA
gtttgagaatggtgtgattctgtagggttgaaaaaccttacagaatttacaccataagttcaaataaaaatttattcaaatcgtcgcaagactccacattgtgtgggcaaaaacaccgctgcagcggtgtttttt

SEQ ID NO: 433 - RNA, 120 nt, synthetic construct
  source 1..120: mol_type = other RNA
gtttgagaaccttgtaaattagaaataatttacaaggtgagttcaaataaggatttatccgaaatcgccgaaatggcccacattgtgtggataaaaaagactttattacaaagtcttttt

SEQ ID NO: 434 - RNA, 194 nt, synthetic construct
  source 1..194: mol_type = other RNA
gtttgactaccagtcggttcgccactgctccaaaacgaaagtcttgataccagtcgggacgccactgcaagtcaaaataaaggcttagcctaaaatgtctccctaccggagacggtgcgtaggcacaaaatccgacttgccagcaggagctttcgagctcctgctttcattttagaatcccttatgtacttttt

SEQ ID NO: 435 - RNA, 130 nt, synthetic construct
  source 1..130: mol_type = other RNA
gtttgagagtagtgtaaaatcgtatgatactaaaacttcggatttatcatatagttacgattttacacattacgagttcaaataacgattaaatcgaaaccacctatatggtactgcggttgcagttttt

SEQ ID NO: 436 - RNA, 155 nt, synthetic construct
  source 1..155: mol_type = other RNA
gtttgagagtagtgtaaaatcgtatgatactaaaacttcggatttatcatatagttacgattttacacattacgagttcaaataacgattaaatcgaaaccacctatatggtactgcggttgcagtttttaaagacttgattatcaggtcttttt

SEQ ID NO: 437 - RNA, 114 nt, synthetic construct
  source 1..114: mol_type = other RNA
gttttggagcagtgtcattttgactggtaatcaaacgaaaattttgacttgcagtgtcactttgactggaatcaaagcaaggtcattgtaatacatttaggagcgtgtaacaag

SEQ ID NO: 438 - RNA, 140 nt, synthetic construct
  source 1..140: mol_type = other RNA
gttttggagcagtgtcattttgactggtaatcaaacgaaagctttgattccagtcaaagtgacactgcaagtcaaaataaaggtttaaccttaaaagccattacattttgtgtggcggtacgtaggtaccacttcttttt

SEQ ID NO: 439 - RNA, 169 nt, synthetic construct
  source 1..169: mol_type = other RNA
gttttggagcagtgtcattttgactggtaatcaaacgaaactttgattccagtcgaagtgacactgcaagtcaaaataaaggtttaaccttaaaagccattacactttgtatggcggtacgtaggtaccatctcttgcaatatgcaagccccttatctgaggggctttt

SEQ ID NO: 440 - RNA, 97 nt, synthetic construct
  source 1..97: mol_type = other RNA
gtgtcattttgactgggaaactggattatggacgcatcattgcaaaaggtactgcaagcgaaatccaaaatgacccccgcgttatcgaggcgtattt

SEQ ID NO: 441 - RNA, 134 nt, synthetic construct
  source 1..134: mol_type = other RNA
gtttgagaatagtgtaatttcatatagagaaatctttatgaaattacactagttcaaataaagatttatccaaatcgtctgccgaaaggcgacacaccgttatcggtgaaacccacttaggtgggtttattttt

SEQ ID NO: 442 - RNA, 152 nt, synthetic construct
  source 1..152: mol_type = other RNA
gtttgagagtcgtgtaatatcatcgtgtgactgaacgaaagttcaattacacgattgaattttacacgacgagttcaaataagcgatatggcatatttatgggtgtcattagcgaaaatacactttgagtgaggcctattgtgggccttttt

SEQ ID NO: 443 - RNA, 85 nt, synthetic construct
  source 1..85: mol_type = other RNA
gtaactgagaaatcgtgccgctgacgacttttaagccaatttgaggtttgagagtcgtgtaatattatcgtgtaactgaacattt

SEQ ID NO: 444 - RNA, 96 nt, synthetic construct
  source 1..96: mol_type = other RNA
gaggtttgaggaaactgcaagcatcttttactatataattataagtgatcagttacgaaaatattaagcgagagtcgtgccgctgacgacttttaa

SEQ ID NO: 445 - RNA, 142 nt, synthetic construct
  source 1..142: mol_type = other RNA
gtttgagagtcgtgtaatattatcgtgtaactgaacgaaagatcagttacgaaaatattaagcgagagtcgtgccgctgacgacttttaagccaatttgaggtttgagagtcgtgtaatattatcgtgtaactgaacatttc

SEQ ID NO: 446 - RNA, 108 nt, synthetic construct
  source 1..108: mol_type = other RNA
gtttgagagtcgtgtaatgaaaattaagcgagagtcgtgccgctgacgacttttaagccaatttgaggtttgagagtcgtgtaatattatcgtgtaactgaacatttc

SEQ ID NO: 447 - RNA, 121 nt, synthetic construct
  source 1..121: mol_type = other RNA
gttgtagctccctttctcatttcggaaacgaaatgagaaccgttgctacaataaggccgtctgaaaagatgtgccgcaacgctctgccccttaaagcttctgctttaaggggcatcgttta

SEQ ID NO: 448 - RNA, 119 nt, synthetic construct
  source 1..119: mol_type = other RNA
gttgtagctccctttctcatttcggaaacgaaatgagaaaacgttgctacaataagagattcaatagaatttcgtaaagctctgctccttaatacttcggtgttaaggagcatcttttt

SEQ ID NO: 449 - RNA, 91 nt, synthetic construct
  source 1..91: mol_type = other RNA
tggcgaaccggaaacgaactcgccaaacgacagaacgcagagaccgaagagattacggtcgaggtggaagaggtggtggaggacgccgttt

SEQ ID NO: 450 - RNA, 160 nt, synthetic construct
  source 1..160: mol_type = other RNA
gttttggagcagtggcgaaccgactggtagtcaaacgaaaccatgtctgccgacgagcgcgatgcttttgcggccaaggtggccgaactcgccaaacgacagaacgcagagaccgaagagattacggtcgaggtggaagaggtggtggaggacgccgttt

SEQ ID NO: 451 - RNA, 120 nt, synthetic construct; identical to SEQ ID NO: 433
  source 1..120: mol_type = other RNA

SEQ ID NO: 452 - RNA, 123 nt, synthetic construct
  source 1..123: mol_type = other RNA
gtttgagaaccttgtaaattatgataagtgtaaaacgaaatagatttagtttgtaatttacaaggtgagttcaaataaggatttatccgaaatcgccgaaatggcccacattgtgtggataaa

SEQ ID NO: 453 - RNA, 91 nt, synthetic construct
  source 1..91: mol_type = other RNA
gtttgagaaccttgtaaatgaaaatttacaaggtgagttcaaataaggatttatccgaaatcgccgaaatggcccacattgtgtggataaa

SEQ ID NO: 454 - RNA, 83 nt, synthetic construct
  source 1..83: mol_type = other RNA
gtttgagaaccttgtgaaaacaaggtgagttcaaataaggatttatccgaaatcgccgaaatggcccacattgtgtggataaa

SEQ ID NO: 455 - RNA, 84 nt, synthetic construct
  source 1..84: mol_type = other RNA
gtttgagaaccttgtgaaaacaaggtgagttcaaataaggatgtatccgacatcgccgaaatggcccacattgtgtggataaat

SEQ ID NO: 456 - RNA, 90 nt, synthetic construct
  source 1..90: mol_type = other RNA
gtttgagaaccttgtgaaaacaaggtgagttcaaataaggatttatccgaaatcgccgacgaaatgtcggcccacattgtgtggataaat

SEQ ID NO: 457 - RNA, 89 nt, synthetic construct
  source 1..89: mol_type = other RNA
gtttgagaaccttgtgaaaacaaggtgagttcaaataaggatttatccgaaatcgccgacttcggtcggcccacattgtgtggataaat

SEQ ID NO: 458 - RNA, 90 nt, synthetic construct
  source 1..90: mol_type = other RNA
gtttgagaaccttgtgaaaacaaggtgagttcaaataaggatgtatccgacatcgccgacgaaatgtcggcccacattgtgtggataaat

SEQ ID NO: 459 - RNA, 90 nt, synthetic construct
  source 1..90: mol_type = other RNA
gttggagaaccttgtgaaaacaaggtgagttccaataaggatttatccgaaatcgccgacgaaatgtcggcccacattgtgtggataaat

SEQ ID NO: 460 - RNA, 96 nt, synthetic construct
  source 1..96: mol_type = other RNA
gtttgagaaccttgtgaaaacaaggtgagttcaaataaggatttatccgaaatcgccgacgaaatgtcggcccacgacattgtgtcgtggataaat

SEQ ID NO: 461 - RNA, 109 nt, synthetic construct
  source 1..109: mol_type = other RNA
gttttggagcagtgtcattttgactggtaatcaaacgaaattttgacttgcagtgtcactttgactggaatcaaagcaaggtcattgtaatacatttaggagcgtgtaa

SEQ ID NO: 462 - RNA, 114 nt, synthetic construct
  source 1..114: mol_type = other RNA
gttttggtttggtatcattcttatgtagtatgaaatatactacataagaatgatacatttagtcaagataagactttatgtcgtacccgccgacaggatatcctagtcggtttt

SEQ ID NO: 463 - RNA, 145 nt, synthetic construct
  source 1..145: mol_type = other RNA
gttttgatctattaacatttattactgcaattaaaggaaattttacttgcagtaataaatgtttaatagaatcaagataatgcttgatgtagagcggttgggtatccgcaaacaactcccaaagatgtctttatggcatcttttt

SEQ ID NO: 464 - RNA, 136 nt, synthetic construct
  source 1..136: mol_type = other RNA
gttttagaaatatgttattttagatagtaatgaaaattactatctaaaatagcatattgagttaaaataagtgtaaactataatgccaagtaattggtttcacttaggtgaagttagagcttttcgaagctctttt

SEQ ID NO: 465 - RNA, 153 nt, synthetic construct
  source 1..153: mol_type = other RNA
gtttgagagtaatgtaatttcatagaggtctcaaatgaaaacgtaagacccctatgaaattacgttacgcgttcaaataaaggtaaacccaaatcgttggcttgaccaactgcacagtgtgtgcgttcaggactgcttcagtgcagtcctttt

SEQ ID NO: 466 - RNA, 91 nt, synthetic construct
  source 1..91: mol_type = other RNA
gtttgagagtaatgtaatgaaaattacgttacgcgttcaaataaaggtaaacccaaatcgttggcttgaccaactgcacagtgtgtgcgtt

SEQ ID NO: 467 - RNA, 91 nt, synthetic construct
  source 1..91: mol_type = other RNA
gtttgagagtggtgtaatgaaaattacgccacgcgttcaaataaaggtaggcccaaatcgttggcccgaccaactgcacagtgtgtgcgtt

SEQ ID NO: 468 - RNA, 97 nt, synthetic construct
  source 1..97: mol_type = other RNA
gtttgagagtaatgtaatgaaaattacgttacgcgttcaaataaaggtaaacccaaatcgttggcttgaccaactgcacgacagtgtgtcgtgcgtt

SEQ ID NO: 469 - RNA, 97 nt, synthetic construct
  source 1..97: mol_type = other RNA
gtttgagagtggtgtaatgaaaattacgccacgcgttcaaataaaggtaggcccaaatcgttggcccgaccaactgcacgacagtgtgtcgtgcgtt

SEQ ID NO: 470 - RNA, 97 nt, synthetic construct
  source 1..97: mol_type = other RNA
gtttgagagtaatgtaatgaaaattacgttacgcgttcaaataaaggtaggcccaaatcgttggcccgaccaactgcacgacagtgtgtcgtgcgtt

SEQ ID NO: 471 - RNA, 91 nt, synthetic construct
  source 1..91: mol_type = other RNA
gtttgagagtaatgtgaaaacgttacgcgttcaaataaaggtaaacccaaatcgttggcttgaccaactgcacgacagtgtgtcgtgcgtt

SEQ ID NO: 472 - RNA, 91 nt, synthetic construct
  source 1..91: mol_type = other RNA
gtttgagagtaatgtgaaaacgttacgcgttcaaataaaggtaggcccaaatcgttggcccgaccaactgcacgacagtgtgtcgtgcgtt

SEQ ID NO: 473 - RNA, 182 nt, synthetic construct
  source 1..182: mol_type = other RNA
aagaagagccaggattgacttataaggttctcatacgaaagtacaatgaagaaccggatatgcaggaaatcctgaaaatggccggattgcagatcgaggtgcaaaaagacagtatgttggaaggtattgtagagtatctgaaaatactacatgatctgttgggacaaagtgtatttgtcttt

SEQ ID NO: 474 - RNA, 160 nt, synthetic construct
  source 1..160: mol_type = other RNA
gtagtgtcattctgactggtaatcaaacgaaagtcccgattaccagtcaggacaacactgcgagtcaaaatacggctttgccaaaaatgttatccatttgggtaacgccacgtaggtggcactttgacttgtcaaaagccttcctgtttggaaggctttt

SEQ ID NO: 475 - RNA, 130 nt, synthetic construct
  source 1..130: mol_type = other RNA
gtttcagtcctcagaaccattaagttattattgtagggaaatttattccgaataattatctagttctatggactgaaatcatgaaaagcgcgatgcggccctccctctgctaagcatggagggttatttt

SEQ ID NO: 476 - RNA, 229 nt, synthetic construct
  source 1..229: mol_type = other RNA
atcatataatttcaaagaacaatagagtttgaaacgaaagtgttcaaaagaaatcgttttatctactttgaaattaattgatagatcagagattgaagatattttaaagaaagataaatcctgcgagatcagctgcgctttctgtgaaaaaaaatatcatttcgatgaatcagaacttatttcattactctcatagtctcacatgtgtaatatttacacatgtgttttt

SEQ ID NO: 477 - RNA, 188 nt, synthetic construct
  source 1..188: mol_type = other RNA
gtttcaaactctattgttctttgaaattatatgattggaaacgtgtaacagaacaatagatttgaaaacaccgaaaggttgttagaatcaacttggggcatgttgtaaatctgctccacaatttaaaaattcctgtcattgcaaagattgaggtattcacactgattgcattgaaattctgtcgcact

SEQ ID NO: 478 - RNA, 86 nt, synthetic construct
  source 1..86: mol_type = other RNA
gtttaagagctatgctggaaacagcatagcaagtttaaataaggctagtccgttatcaacttgaaaaagtggcaccgagtcggtgc

SEQ ID NO: 479 - RNA, 142 nt, synthetic construct
  source 1..142: mol_type = other RNA
gtttgagagtcgtgtaatattatcgtgtaactgaacgaaagttcaattacacgattgaatatacacgacaagttcaaataagccggtcactatgagaccgtagcgataacacactctagtgaggcctattgtgggccttttt

SEQ ID NO: 480 - RNA, 149 nt, synthetic construct
  source 1..149: mol_type = other RNA
gtttgagagtgatgtagttttgaacaggtctcaaacgaaagtttgaaacctgttcagactacatcacgcgttcaaataacatttctttcaaccgccggatttccggcaccacagtgtgtggaatgaaaagccgccttgtgcggcttttt

SEQ ID NO: 481 - RNA, 114 nt, synthetic construct
  source 1..114: mol_type = other RNA
gtttgagagttatgttattctagaaatggaataacataacgagttcaaataaatgtattcctatcaaacctacatcggtggggattaaagagaaaacatatgttttctcttttt

SEQ ID NO: 482 - RNA, 198 nt, synthetic construct
  source 1..198: mol_type = other RNA
gtttgagagttatgttattctagataccactataacgaaaattattaatattaaaaaatatcttaaatgttatgattttaacaaattcttctattttaaattaagaattttgtcgaatgagttttttgttttaagatttatgttataattaaaaagtattatggtagtgaataagattatgtttatttaaatcctttt

SEQ ID NO: 483 - RNA, 180 nt, synthetic construct
  source 1..180: mol_type = other RNA
gtttgagagttatgttattctagataccactataacgaaagttattattccagaaatatcagaacttattttggaatcgactgggatttctttgacctgtgcattgataagcgaacttgtgaaaaataatgtaaaaattgtgttttgcgatcaaaagaacaatccggaaagtgaggtttt

SEQ ID NO: 484 - RNA, 139 nt, synthetic construct
  source 1..139: mol_type = other RNA
gttttaaatctatgtcatcttaaatggtattaagaaattaataccatttaagatgacatagagagttaaaataaaggttttacaattgtattaccctaaatactcattatgatgagtgtagttgcttaggcaacttttt

SEQ ID NO: 485 - RNA, 147 nt, synthetic construct
  source 1..147: mol_type = other RNA
gttttaaatctatgtcatcttaaatggtattaaaacgaaagtcttaataccatttaagatgacatagagagttaaaataaaggttttacaattgtattaccctaaatactcattatgatgagtgtagttgcttaggcaacttttttt

SEQ ID NO: 486 - RNA, 188 nt, synthetic construct
  source 1..188: mol_type = other RNA
gttttaaatctatgtcatcttaaatggtattaaaacgaaattttaactctctatgtcatcttaaatggtattaagacaactacataataccatagtagtaggaggtatgtcaattgaaaaaatacaacattggactagatattggtacaacatcagttggatgggcagtagtggaaaaagaaaatttt

SEQ ID NO: 487 - RNA, 139 nt, synthetic construct
  source 1..139: mol_type = other RNA
gttttgttaccatatgtattattgttagactaagacgaaagtcatagtctaacaataatctatatgatctaacaaaacaagggtttatcccggaatcggctcttcggagccttttttatttatgttatgggatatagaa

SEQ ID NO: 488 - RNA, 136 nt, synthetic construct
  source 1..136: mol_type = other RNA
gttttagatctatgttatcttgaatggtattaaaacgaaagtcttaataccatttaagataacatagagagttaaaataaagctttaagcctaaatacacacgttttgtgtgggaacagttagtctgttctttttt

SEQ ID NO: 489 - RNA, 157 nt, synthetic construct
  source 1..157: mol_type = other RNA
gttttagatctatgttatcttgaatggtattaaaacgaaagtcttaataccatttaagataacatagagagttaaaataaagctttaagcctaaatacacacgttttgtgtgggaacagttagtctgttctttttttgtctatttatttaaattttt

SEQ ID NO: 490 - RNA, 192 nt, synthetic construct
  source 1..192: mol_type = other RNA
gttttagatctatgttatcttgaatggtattaaaacgaaagagttaaaataaagctttaagcctaaatacacacgttttgtgtgggaacagttagtctgttctttttttgtctatttatttaaatttttgactctgtcctagataatgcacaatattacttaaaacgctagataattttttgttactatttt

SEQ ID NO: 491 - RNA, 142 nt, synthetic construct
  source 1..142: mol_type = other RNA
gtttgagagtcgtgtaatatcatcgtgttgctgaacgaaagttcaatgacacgattgaatttacacgacaagttcaaataagcaagcatgctttgcatgcgtagcgaaatcacacttttgtgaggcctattgtgggcttttt

SEQ ID NO: 492 - RNA, 98 nt, synthetic construct
  source 1..98: mol_type = other RNA
gtttgagagtcgtgtaagaaattacacgacaagttcaaataagcaagcatgctttgcatgcgtagcgaaatcacacttttgtgaggcctattgtgggc

SEQ ID NO: 493 - RNA, 147 nt, synthetic construct
  source 1..147: mol_type = other RNA
gtttgagagtcgtgtaatatcatcgtgttgctgaacgaaagttcaatgacacgattgaatttacacgacaagttcaaataagcaagcatgctttgcatgcgtagcgaaatcacgacacttttgtcgtgaggcctattgtgggctttt

SEQ ID NO: 494 - RNA, 147 nt, synthetic construct
  source 1..147: mol_type = other RNA
gtttgagagtcgtgtaatatcatcgtgttgctgaacgaaagttcaatgacacgattgaatttacacgacaagttcaaataagcaagcatgctttgcatgcgtagcgaaatcacacttttgtgaggccgactattgtggtcggctttt

SEQ ID NO: 495 - protein, 98 aa, synthetic construct
GTTTGAGAGTCGTGTGAAAACACGACAAGTTCAAATAAGCAAGCATGCTTTGCATGCGTAGCGAAATCACACTTTTGTGAGGCCTATTGTGGGCTTTT

SEQ ID NO: 496 - RNA, 101 nt, synthetic construct
  source 1..101: mol_type = other RNA
gtttgcgagtcgtgtaagaaattacacgacaagcgcaaataagcaagcatgctttgcatgcgtagcgaaatcacacttttgtgaggcctattgtgggcttt

SEQ ID NO: 497 - RNA, 107 nt, synthetic construct
  source 1..107: mol_type = other RNA
gtttgagagtcgtgtaagaaattacacgacaagttcaaataagcaagcatgctttgcatgcgtagcgaaatcacgacacttttgtcgtgaggcctattgtgggcttt

SEQ ID NO: 498 - RNA, 107 nt, synthetic construct
  source 1..107: mol_type = other RNA
gtttgagagtcgtgtaagaaattacacgacaagttcaaataagcaagcatgctttgcatgcgtagcgaaatcacgacactattgtcgtgaggcctattgtgggcttt

SEQ ID NO: 499 - RNA, 107 nt, synthetic construct
  source 1..107: mol_type = other RNA
gtttgcgagtcgtgtaagaaattacacgacaagcgcaaataagcaagcatgctttgcatgcgtagcgaaatcacgacacttttgtcgtgaggcctattgtgggcttt

SEQ ID NO: 500 - RNA, 107 nt, synthetic construct
  source 1..107: mol_type = other RNA
gtttgcgagtcgtgtaagaaattacacgacaagcgcaaataagcaagcatgctttgcatgcgtagcgaaatcacgacactattgtcgtgaggcctattgtgggcttt

SEQ ID NO: 501 - RNA, 111 nt, synthetic construct
  source 1..111: mol_type = other RNA
gttttagatctgtgtcatcttgaagaaatttaagatgacatagagagttaaaataaagctttaagcctaaatgctcacattatgtgttcgaacagttagtctgttcttttt

SEQ ID NO: 502 - RNA, 145 nt, synthetic construct
  source 1..145: mol_type = other RNA
gttttagatctgtgtcatcttgaatggtattaaaacgaaagataattcttttaaaagataagtagaaatagatactgatatagaatctactattattgtatctatttctgataaatgaacatacttctcatcactatcctgtttt

SEQ ID NO: 503 - RNA, 159 nt, synthetic construct
  source 1..159: mol_type = other RNA
gttttagatctgtgtcatcttgaatggtattaaaacgaaagtgatgagaagtatgttcatttatcagaaatagatacaataatagtagattctatatcagtatctatttctacttatcttttaaaagaattatctgacaataagataaacattattttt

SEQ ID NO: 504 - RNA, 117 nt, synthetic construct
  source 1..117: mol_type = other RNA
gtttgagaaccttgtaagttaggaaggatatagaaatataatctgttcaacttacaaggtgagtgcaaataaggatatttccgaaatcgctcatatctatgagtccgcacggtgcgg

SEQ ID NO: 505 - RNA, 120 nt, synthetic construct
  source 1..120: mol_type = other RNA
gtttgagaaccttgtaagttaggaaggatataaaacgaaagtaggtttacagttatcataacatacatttctgcagatttcatcaaaataatacggcgccggcggcaaagccgtattttt

SEQ ID NO: 506 - RNA, 173 nt, synthetic construct
  source 1..173: mol_type = other RNA
gtttgagaaccttgtaagttaggaaggatataaaacgaaagtattattttgatgaaatctgcagaaatgtatgttatgataactgtaaacctactataaccgggagagaaaggcaatttcaaacgcatgggcagtaaagtctaaaataaaaaaaggctttaaaaaagcctttt

SEQ ID NO: 507 - RNA, 117 nt, synthetic construct
  source 1..117: mol_type = other RNA
gtttgagagcattgttgttttgtagaaatacaaaacaacaatgcaagttcaaataaagaattttcctaatcacttatcgcatcggcgattaactcttctcttatgaggggagttttt

SEQ ID NO: 508 - RNA, 142 nt, synthetic construct
  source 1..142: mol_type = other RNA
gtttgagagcattgttgttttgtaaaacactgaaacgaaaatataattaaaatacaaaacaacaatgcaagttcaaataaagaattttcctaatcacttatcgcatcggcgattaactcttctcttatgaggggagtttttt

SEQ ID NO: 509 - RNA, 179 nt, synthetic construct
  source 1..179: mol_type = other RNA
gtttgagagcattgttgttttgtaaaacactgaaacgaaaggtcgacagcgattttgttccgtttaaaaaataataaaatgttagacgctttgtatttatctatctagcgcctcaattataacaatgctctcaaacactagatattataccgttacgtatgtatgcgtttcaatgtttt

SEQ ID NO: 510 - RNA, 143 nt, synthetic construct
  source 1..143: mol_type = other RNA
gtttgagagtcttgtagtttcataagcagttaaaacgaaagtttataatatagctattgaaactacaagacaaagttcaaataaaaatttattctacccacttaatcgcatcggcgatacggcttcccacaaggaagcttttt

SEQ ID NO: 511 - RNA, 205 nt, synthetic construct
  source 1..205: mol_type = other RNA
gtttgagagtcttgtagtttcataagcagttaaaacgaaagtttataatatagctattgaaactacaagacaaagttcaaataaaaatttattctacccacttaatcgcatcggcgatacggcttcccacaaggaagctttttttcttttggtctgcgctcttgcccgatacaataactgtatttaaattagtatagcatatttt

SEQ ID NO: 512 - RNA, 203 nt, synthetic construct
  source 1..203: mol_type = other RNA
gtttgagagtcttgtagtttcataagcagttaaaacgaaattataatatagctattgaaactacaagacaaagttcaaataaaaatttattctacccacttaatcgcatcggcgatacggcttcccacaaggaagctttttttcttttggtctgcgctcttgcccgatacaataactgtatttaaattagtatagcatatttt

SEQ ID NO: 513 - RNA, 149 nt, synthetic construct
  source 1..149: mol_type = other RNA
gtttgagaatgatgtaaaaatgtatggtactcaaacgaaagttaagtaccatacttaattttacatcataagttcaaataaaaatttattcaaatcgccttagggcatcacagtgtgtgaatgatgaaaactcgcagtagcgggttttt

SEQ ID NO: 514 - RNA, 158 nt, synthetic construct
  source 1..158: mol_type = other RNA
gtttgagaatgatgtaaaaatgtatggtactcaaacgaaaattagttaagtaccatacttaattttacatcataagttcaaataaaaatttattcaaatcgccttagggcatcacagtgtgtgaatgatgaaaactcgcagtagcgggtttttatttt

SEQ ID NO: 515 - RNA, 165 nt, synthetic construct
  source 1..165: mol_type = other RNA
gtttgagaatgatgtaaaaatgtatggtactcaaacgaaattatgggaaagactccataatccagattccaacctcctcgaattcgagggggttagaaaacaggcatgagcgaatgcatttacaatgtcacctaagaaacggattggtgctattggtattgtttt

SEQ ID NO: 516 - RNA, 114 nt, synthetic construct
  source 1..114: mol_type = other RNA
gtttgagagtcttgttgtttcatagaaatatgaacaacaagacaaagttcaaataaaaatttattccaatcacttaatcgcagtggcgaacaagctcccgaaagggagtttttt

SEQ ID NO: 517 - RNA, 184 nt, synthetic construct
  source 1..184: mol_type = other RNA
gtttgagagtcttgttgtttcataagcagttaaaacgaaagttttctccgccctcgaacaagctgttgaaataaacctttgcggcgtgcccttctctgtttgtcctatctccgtccgtaacctgcgaggcatattcgacaagcatatccgcttccttggtttttcctcgtccccataatatttt

SEQ ID NO: 518 - RNA, 136 nt, synthetic construct
  source 1..136: mol_type = other RNA
gtttgagagtcttgttgtttcataagcagttaaaacgaaagaaaagtgtatcggatagcgatataaaggactataacaaaaaactccctttcgggagcttgttcgccactgcgattaagtgattggaataaatttt

SEQ ID NO: 519 - RNA, 131 nt, synthetic construct
  source 1..131: mol_type = other RNA
gtttgagagttttgttgtttaggaagtaagtatagaaatataatgatgtcagacaacaaaacaaagttcaaataaaaatttattctaatcacttttcgcatgtgcgaacgaaatgccccgcaaggggtttt

SEQ ID NO: 520 - RNA, 201 nt, synthetic construct
  source 1..201: mol_type = other RNA
gtttgagaatgatgtaaaaatgtatggtactcaaacgaaatttgaacttatgatgtaaatttagtatggtactaaacttgtttttattatacaggaaatcagtaagataagcaatcctttttctatcacttcctcgctacaatattaaaagaatacaaaacatcccacttatttcctgtaaattgataattttcttctttt

SEQ ID NO: 521 - RNA, 153 nt, synthetic construct
  source 1..153: mol_type = other RNA
gtttgagaatgatgtaaaaatgtatggtactcaaacgaaagtttagtaccatactaaatttacatcataagttcaaataaaaatttattcaaaccgccaccgttaggtggctcacagtgtgtgaaacaaaaaacctgctttgcaggttttttt

SEQ ID NO: 522 - RNA, 162 nt, synthetic construct
  source 1..162: mol_type = other RNA
gtttgagaatgatgtaaaaatgtatgatacttaaacgaaagtttagtaccatactaaatttacatcataagttcaaataaaaatttattcaaaccgccaccgttaggtggctcacagtgtgtgaaacaaaaaacctgctttgcaggtttttttgtatgtaaa

SEQ ID NO: 523 - RNA, 124 nt, synthetic construct
  source 1..124: mol_type = other RNA
tttagtacctgtagtaactgggttatcgaaatctgaaaagatttacgataactcaattattacagatctgctaaaacaaggctttatgccgaaatcaaggacatcgacggatgtccttttttct

SEQ ID NO: 524 - RNA, 171 nt, synthetic construct
  source 1..171: mol_type = other RNA
aaaatgtcagagaaataaaagaaattttaattttcaattgtcattttgaacaataattgtggtttcgccttcaaaagtaacggcgggatcattatcaactaaagctttgaaaatatttagttgctctttgtattctaaagattttgctgtgttcaatattttagttgatga

SEQ ID NO: 525 - RNA, 171 nt, synthetic construct; identical to SEQ ID NO: 524
  source 1..171: mol_type = other RNA

SEQ ID NO: 526 - RNA, 186 nt, synthetic construct
  source 1..186: mol_type = other RNA
gtttgagaaccttgtaagttaagaggggtaaggaaacttggcaatcttgatctgggaacaggctcacagaccccgcaaagcgccatgacatttaatgaggaacgcgtccggctccgccagcagataagggaacaggaaaaagagatccgctgtttttgactgttttgattgccgtgtggccggact

SEQ ID NO: 527 - RNA, 149 nt, synthetic construct
  source 1..149: mol_type = other RNA
gtttgagaatgatgtaaaaatgtatggtactcaaacgaaaagttaagtaccatacttaattttacatcataagttcaaataaaaatttattcaaatcgccttagggcatcacagtgtgtgaatgatgaaaactcgcagtagcgggtttt

SEQ ID NO: 528 - RNA, 140 nt, synthetic construct
  source 1..140: mol_type = other RNA
gtttgagagttgtgcaatattatcgtgtaactgaacgaaagttcaattacacgattgaatatacacgacaagttcaaataagctggcggactatgactgccatagcgattacacttattgaggcctattgtgggcctttt

SEQ ID NO: 529 - RNA, 186 nt, synthetic construct
  source 1..186: mol_type = other RNA
agtttcaaattaagttttgtttcgatataatgtgccacgaaagtggcacattatatcgaaacattaccactgattgaaatcataatgacggataaatacaaatgaagtgggtcatctggtcactggcgacttgtcgccataccatacccatccgtcacttttgataggtttttcaaaacctatcat

SEQ ID NO: 530 - RNA, 171 nt, synthetic construct
  source 1..171: mol_type = other RNA
gtttgtgatgtgtgttgtttgttcggaaatcaggagaaatcttgaaattaactcacacaacagataagaagttaatgaaactgctgtgttttcaataattaaaaccgcaatttcacttaggtggattcgcttggtggattcaattgatcgaaccaccaagtaatccatctt

SEQ ID NO: 531 - RNA, 157 nt, synthetic construct
  source 1..157: mol_type = other RNA
gtttgagagtagtgctatctttaactattttcaaagaaatttgtagatgaaaagatagcactacaaagttcaaagtgagccactgtgcctggcctaagcgttttgctaatctacttgaaaaagaagccattaggctagatctccgtaaggagatttt

SEQ ID NO: 532 - RNA, 160 nt, synthetic construct
  source 1..160: mol_type = other RNA
gtttcagttgctgagtagtcggttatattggtgaaaaccaatatagctgattactgatgcactgtaatcataaaaaagtattttgagcagacctctgcacagcacgtctgatattgcttagcaaaataggatatccacctttggttggatatcctatttt

SEQ ID NO: 533 - RNA, 141 nt, synthetic construct
  source 1..141: mol_type = other RNA
gtttgagaatgatgtaatcttgtataggtattagaaataatacctatacaagattacatcatgagttcaaataaaaatttattcaaatcatccttcgggattctatgtgtagaacaaaaacaagtcttcggacttgttttt

SEQ ID NO: 534 - RNA, 154 nt, synthetic construct
  source 1..154: mol_type = other RNA
gtttgagagtagtgtaaatttataggggactaaaacgaaagttgtagtcccctacaaatttgcactacgagttcaaataaaagatttctcaaatcgtcgttttacgacctcacagtgtgtgagaaaatcggcttcctgaataaggaggtctttt

SEQ ID NO: 535 - RNA, 172 nt, synthetic construct
  source 1..172: mol_type = other RNA
gttttgttaccagcaaaattcacatagctctcaaagaaatttgaacttgctatgtgattttgctggtaacaaaaccacattctttataaaacaaatccggggaattgtcaaattttgaaaataatgccggccggcttgaggaggccgtgctgttaccatgtgctgttcaaat

SEQ ID NO: 536 - RNA, 149 nt, synthetic construct
  source 1..149: mol_type = other RNA
gtttgagagctttgtaaatcagaaaaggtaacaaacgaaagttaatgctattttataagtgatttacaaagcgagttcaaataagaatttattcgaaatcgtcgtaagatccgcatggtgcggtaaaaacttcctttatggaagttttt

SEQ ID NO: 537 - RNA, 179 nt, synthetic construct
  source 1..179: mol_type = other RNA
ttttggtcctattcaaaactacatgggaaaccacgtacgattgaagatttccagaagtttccgctttagttgcctaaaattatcttctcgattcgtgtagataatttcgtcgaccgccggtcgaaagggttccataaagtcgctggccagattgtattgattaaattgattgccgtgga

SEQ ID NO: 538 - RNA, 202 nt, synthetic construct
  source 1..202: mol_type = other RNA
gttttagagccatgtagttttgaataggaccaaaacgaaagtattggaacacgatccctcttcgactacagtcctgaagcatatttatgaggatctgaccgcgcaattgaacgacacggttgaaaaacgaacagagctggaacgcctgattttgcaaatgtcggatttgtttcagcaagaacttcttgagcacgagcttcat

SEQ ID NO: 539 - RNA, 153 nt, synthetic construct
  source 1..153: mol_type = other RNA
gttttagagccatgtagttttgaataggaccaaaacgaaagtattggaacacgatccctcttcgactacagtcctgaagcatatttatgaggatctgaccgcgcaattgaacgacacggttgaaaaacgaacagagctggaacgcctgatttt

SEQ ID NO: 540 - RNA, 131 nt, synthetic construct
  source 1..131: mol_type = other RNA
gttttagatctatgttatcttaaatggtattaaaacgaaagtcttaataccattttaagatgacatagagagttaaaataaaggttttaccctaaatactcattatgtgagatgctgcttaggcagctttt

SEQ ID NO: 541 - RNA, 177 nt, synthetic construct
  source 1..177: mol_type = other RNA
gttttggagcagtggcatcccaactggtaatcaagaaattgaccatggaaaggagcaccgcgtatccataatttaaggccgcattgacggggacatcgagattgcgcgaaaagccgcttccgaatagcgcagcgaaatatgttcgagccgcctgcgcttctcgattggtggtatctc

SEQ ID NO: 542 - RNA, 158 nt, synthetic construct
  source 1..158: mol_type = other RNA
gttttggagcagtggcatcccaactggtaatcaaacgaaagtctcgataccagttgggacaccactgcaagtcaaaataacggcttttgccttgaatgccttcgggcggcgcgttaggcgcttctatgacttgccgaaaagcctcttcggaggctttt

SEQ ID NO: 543 - RNA, 202 nt, synthetic construct
  source 1..202: mol_type = other RNA
gttttggagcagtggcatcccaactggtaatcagaaatgttgaccatggaaaggagcaccgcgtatccataatttaaggccgcattgacggggacatcgagattgcgcgaaaagccgcttccgaatagcgcagcgaaatatgttcgagccgcctgcgcttctcgattggtggtatctcctgaacggacttccaccacagcac

SEQ ID NO: 544 - RNA, 126 nt, synthetic construct
  source 1..126: mol_type = other RNA
tgtttgagagccttgtaaatcaagaaattgatttacaaggtgagttcaaataaggatttatccgtatctgtttacctgcattgtgcagtacctttgtaaaccaagagctgttattcagctcttttt

SEQ ID NO: 545 - RNA, 157 nt, synthetic construct
  source 1..157: mol_type = other RNA
ttttagtacctgaaagaattgagttatcgtaaaagaaattttacgataactcaattctttcagatctactaaaacaaggctttatgccgaaattaaggacatcgacggatgtccttttttctttctgaaaatggagggataatatgagttttcgtgt

SEQ ID NO: 546 - RNA, 119 nt, synthetic construct
  source 1..119: mol_type = other RNA
ttttagtacctgaaagaattgagttatcgtaaaagaaattttacgataactcaattctttcagatctactaaaacaaggctttatgccgaaattaaggacatcgacggatgtccttttt

SEQ ID NO: 547 - RNA, 153 nt, synthetic construct
  source 1..153: mol_type = other RNA
gtttgagagttttgtaaattatgataggtgttagaaataacgcaatgttatgttgaatatgtaatttacaaaacgagttcaaataaggatttatccgaaatcgccgtaaggcccacatggtgtggatgaaaaagacttttcgaagtctttttt

SEQ ID NO: 548 - RNA, 130 nt, synthetic construct
  source 1..130: mol_type = other RNA
gtttgagagttttgtaaattatgataggtgttagaaataacgcaatgttatgttgaatatgtaatttacaaaacgagttcaaataaggatttatccgaaatcgccgtaaggcccacatggtgtggatgaa

SEQ ID NO: 549 - RNA, 139 nt, synthetic construct
  source 1..139: mol_type = other RNA
gtttgctaagtgtgttaaataagacgggtcctagaaatgcgacttgtttctttgctctctcatcagacatcacgaagtcatttccggtaggagaagtcgggaatgaatctttgaagttggcacgagtgaagttgtggat

SEQ ID NO: 550 - RNA, 190 nt, synthetic construct
  source 1..190: mol_type = other RNA
gtttgctaagtgtgttaaataagacgggtcctatggaaatatgaaactgcggcttatgaggcagacaaaggaaactattcaggattcaactatgacacctcagtagtctatcctttcggatacggactatcctacacttcattctccaatgaatatgaaggtgctcctacatatgatgagaagaatgaaa

SEQ ID NO: 551 - RNA, 146 nt, synthetic construct
  source 1..146: mol_type = other RNA
tttcagttgctaggtgatgggttatactagtgagtggaaacactcgattgatacaactctcggacctgaaactgaaagctgttggcggagaaatccgtcgtcttgccacccgcagcccgcaatgctgccgagctccctgtaggagt

SEQ ID NO: 552 - RNA, 154 nt, synthetic construct
  source 1..154: mol_type = other RNA
gtttcagttgctaggtgatgggttatactagtgagtggaaacgctggcggcactgttaaaacatgttatcaacagcaattggagcattgccgttacgacattgcattcggccctgtacccgcaggcaactattactaagtacaaggatagtttt

SEQ ID NO: 553 - RNA, 129 nt, synthetic construct
  source 1..129: mol_type = other RNA
gttttagaacgatgtagtttcatatggtagcagaaatgtaaccatatgaaactacatcgtgattgttaaaataaatggtaaactacacgcttcggggttttcgccggagcccgccgcaaggcggatttt

SEQ ID NO: 554 - RNA, 144 nt, synthetic construct
  source 1..144: mol_type = other RNA
gttttgttaccatctgaattattgctagaacacaacgaaagttatattctagcaataattcatatgacctaacaaaacaagggtttatcccggattcggctcttcggagccttttcttttacttagtttatgggctatagagta

SEQ ID NO: 555 - RNA, 103 nt, synthetic construct
  source 1..103: mol_type = other RNA
gttttgttaccatctgaattattgctagaagaaattctagcaataattcatatgacctaacaaaacaagggtttatcccggattcggctcttcggagcctttt

SEQ ID NO: 556 - RNA, 135 nt, synthetic construct
  source 1..135: mol_type = other RNA
agggatacgttaccttgttttacattactctcaaagaaaatttgaactcgtaatgttgtacaaggtatgtacaactctattctatttctgaatcgataaaattgcaataggaaattttgtttgcttaattctttt

SEQ ID NO: 557 - RNA, 127 nt, synthetic construct
  source 1..127: mol_type = other RNA
ttctatgacatctttaatggtattaaaacgaaagtctttaataccattaaagatgtcatagaagagttaaaataaaggttttaccctaagaactcatttggctgagaacacctgtagtgggtgtttt

SEQ ID NO: 558 - RNA, 141 nt, synthetic construct
  source 1..141: mol_type = other RNA
gcttgagtgtattgtaaaatcagattcatctgaaaagaataatagtgattttacaatacgagttcaagtaaactctgtgtcttaagcttaatgatcagattcaaagtttgatcggagagtcgcctgcgttggcaggctttt

SEQ ID NO: 559 - RNA, 134 nt, synthetic construct
  source 1..134: mol_type = other RNA
gttttggagcagcgacgttctgagtgagagcaagaaattgttctcactcagaacgacgctgcgagtcaaaataaaggcttagccttacccgcccgcttctgggccccatttagatgggatgaaaggaacctttt

SEQ ID NO: 560 - RNA, 199 nt, synthetic construct
  source 1..199: mol_type = other RNA
gtttgagagtaatgtaattctataaatactcttaatgaaaattataagttacaggaattatataacgaaataaatatagatttgccgatagatatagcctattcgcaatatataggagctaaagaaattataaaactgggggcctttcattttagttatgatgaatatgatattcctaatagtttaattggtcttttag

SEQ ID NO: 561 - RNA, 131 nt, synthetic construct
  source 1..131: mol_type = other RNA
gtttgagagctttgtaaatcagtaagggaaactgtaaatgatttacaaagcgagttcaaataagaattattcgaaatcgccaaccggtccgcatggtgcgggatagaaaagacttcttccggaggtctttt

SEQ ID NO: 562 - RNA, 137 nt, synthetic construct
  source 1..137: mol_type = other RNA
gtttgagagtagtgtaaattcagatggtactgaaaagtaccatctgaatttacactacgcgttcaaataagctttaagcgaagccgccggctctgccggattcacagtgtgtggagaaaaagcccctcggggcttta

SEQ ID NO: 563-570 - skipped (8 entries)

SEQ ID NO: 571 - RNA, 20 nt, synthetic construct
  source 1..20: mol_type = other RNA
accatgcagaggtcgcctct

SEQ ID NO: 572 - RNA, 20 nt, synthetic construct
  source 1..20: mol_type = other RNA
gaccatgcagaggtcgcctc

SEQ ID NO: 573 - RNA, 20 nt, synthetic construct
  source 1..20: mol_type = other RNA
taggctgcccttcttggggg

SEQ ID NO: 574 - RNA, 20 nt, synthetic construct
  source 1..20: mol_type = other RNA
ttaggctgcccttcttgggg

SEQ ID NO: 575 - RNA, 20 nt, synthetic construct
  source 1..20: mol_type = other RNA
tccaggttgcgtgtaccctg

SEQ ID NO: 576 - RNA, 20 nt, synthetic construct
  source 1..20: mol_type = other RNA
ttccaggttgcgtgtaccct

SEQ ID NO: 577 - RNA, 20 nt, synthetic construct
  source 1..20: mol_type = other RNA
caggcttgatcaatggcatg

SEQ ID NO: 578 - RNA, 20 nt, synthetic construct
  source 1..20: mol_type = other RNA
gcaggcttgatcaatggcat

SEQ ID NO: 579 - RNA, 20 nt, synthetic construct
  source 1..20: mol_type = other RNA
agcacatgggaatttcacag

SEQ ID NO: 580 - RNA, 20 nt, synthetic construct
  source 1..20: mol_type = other RNA
cagcacatgggaatttcaca

SEQ ID NO: 581 - RNA, 20 nt, synthetic construct
  source 1..20: mol_type = other RNA
agcctgagacacaaacgaga

SEQ ID NO: 582 - RNA, 20 nt, synthetic construct
  source 1..20: mol_type = other RNA
gagcctgagacacaaacgag

SEQ ID NO: 583 - RNA, 20 nt, synthetic construct
  source 1..20: mol_type = other RNA
gtccagactcggttcttgag

SEQ ID NO: 584 - RNA, 20 nt, synthetic construct
  source 1..20: mol_type = other RNA
cgtccagactcggttcttga

SEQ ID NO: 585 - RNA, 20 nt, synthetic construct
  source 1..20: mol_type = other RNA
ctaaccgaggcgctggaagg

SEQ ID NO: 586 - RNA, 20 nt, synthetic construct
  source 1..20: mol_type = other RNA
gctaaccgaggcgctggaag

SEQ ID NO: 587 - RNA, 20 nt, synthetic construct
  source 1..20: mol_type = other RNA
actccaagtactgtctggtg

SEQ ID NO: 588 - RNA, 20 nt, synthetic construct
  source 1..20: mol_type = other RNA
gactccaagtactgtctggt

SEQ ID NO: 589 - RNA, 20 nt, synthetic construct
  source 1..20: mol_type = other RNA
ctgggctgttctaactgcag

SEQ ID NO: 590 - RNA, 20 nt, synthetic construct
  source 1..20: mol_type = other RNA
gctgggctgttctaactgca

SEQ ID NO: 591 - RNA, 20 nt, synthetic construct
  source 1..20: mol_type = other RNA
ggacttcctaaagcagttct

SEQ ID NO: 592 - RNA, 20 nt, synthetic construct
  source 1..20: mol_type = other RNA
gggacttcctaaagcagttc

SEQ ID NO: 593 - RNA, 20 nt, synthetic construct
  source 1..20: mol_type = other RNA
ctgatcaatcgcctcataga

SEQ ID NO: 594 - RNA, 20 nt, synthetic construct
  source 1..20: mol_type = other RNA
tctgatcaatcgcctcatag

SEQ ID NO: 595 - RNA, 20 nt, synthetic construct
  source 1..20: mol_type = other RNA
tcagggctaaacaaacccag

SEQ ID NO: 596 - RNA, 20 nt, synthetic construct
  source 1..20: mol_type = other RNA
ctcagggctaaacaaaccca

SEQ ID NO: 597 - RNA, 20 nt, synthetic construct
  source 1..20: mol_type = other RNA
cgtctctgatgtcagctgta

SEQ ID NO: 598 - RNA, 20 nt, synthetic construct
  source 1..20: mol_type = other RNA
acgtctctgatgtcagctgt

SEQ ID NO: 599 - RNA, 20 nt, synthetic construct
  source 1..20: mol_type = other RNA
tcagccgggagggttagcat

SEQ ID NO: 600 - RNA, 20 nt, synthetic construct
  source 1..20: mol_type = other RNA
atcagccgggagggttagca

SEQ ID NO: 601 - RNA, 20 nt, synthetic construct
  source 1..20: mol_type = other RNA
caacaactaaaatgatctca

SEQ ID NO: 602 - RNA, 20 nt, synthetic construct
  source 1..20: mol_type = other RNA
gcaacaactaaaatgatctc

SEQ ID NO: 603 - RNA, 20 nt, synthetic construct
  source 1..20: mol_type = other RNA
gtatcatttgcacacacagt

SEQ ID NO: 604 - RNA, 20 nt, synthetic construct
  source 1..20: mol_type = other RNA
agtatcatttgcacacacag

SEQ ID NO: 605 - RNA, 20 nt, synthetic construct
  source 1..20: mol_type = other RNA
ctcaactaagtcagaagtag

SEQ ID NO: 606 - RNA, 20 nt, synthetic construct
  source 1..20: mol_type = other RNA
cctcaactaagtcagaagta

SEQ ID NO: 607 - RNA, 20 nt, synthetic construct
  source 1..20: mol_type = other RNA
ccagactttcacaccttata

SEQ ID NO: 608 - RNA, 20 nt, synthetic construct
  source 1..20: mol_type = other RNA
tccagactttcacaccttat

SEQ ID NO: 609 - RNA, 20 nt, synthetic construct
  source 1..20: mol_type = other RNA
ttaagcttggctttcacaag

SEQ ID NO: 610 - RNA, 20 nt, synthetic construct
  source 1..20: mol_type = other RNA
tttaagcttggctttcacaa

SEQ ID NO: 611 - RNA, 20 nt, synthetic construct
  source 1..20: mol_type = other RNA
cgacggactccaagagcaca

SEQ ID NO: 612 - RNA, 20 nt, synthetic construct
  source 1..20: mol_type = other RNA
ccgacggactccaagagcac

SEQ ID NO: 613 - RNA, 20 nt, synthetic construct
  source 1..20: mol_type = other RNA
tgagacacagggtgcaggct

SEQ ID NO: 614 - RNA, 20 nt, synthetic construct
  source 1..20: mol_type = other RNA
ttgagacacagggtgcaggc

SEQ ID NO: 615 - RNA, 20 nt, synthetic construct
  source 1..20: mol_type = other RNA
tgcaggctggtacttccaag

SEQ ID NO: 616 - RNA, 20 nt, synthetic construct
  source 1..20: mol_type = other RNA
gtgcaggctggtacttccaa

SEQ ID NO: 617 - RNA, 20 nt, synthetic construct
  source 1..20: mol_type = other RNA
gttacccaactccactctca

SEQ ID NO: 618 - RNA, 20 nt, synthetic construct
  source 1..20: mol_type = other RNA
ggttacccaactccactctc

SEQ ID NO: 619 - RNA, 20 nt, synthetic construct
  source 1..20: mol_type = other RNA
atgtggcctctccttccaga

SEQ ID NO: 620 - RNA, 20 nt, synthetic construct
  source 1..20: mol_type = other RNA
gatgtggcctctccttccag

SEQ ID NO: 621 - RNA, 20 nt, synthetic construct
  source 1..20: mol_type = other RNA
ataataggcagaatcccagg

SEQ ID NO: 622 - RNA, 20 nt, synthetic construct
  source 1..20: mol_type = other RNA
cataataggcagaatcccag

SEQ ID NO: 623 - RNA, 20 nt, synthetic construct
  source 1..20: mol_type = other RNA
gtgagaaggtggttgagaaa

SEQ ID NO: 624 - RNA, 20 nt, synthetic construct
  source 1..20: mol_type = other RNA
agtgagaaggtggttgagaa

SEQ ID NO: 625 - RNA, 20 nt, synthetic construct
  source 1..20: mol_type = other RNA
tcactgcaaggcactctcta

SEQ ID NO: 626 - RNA, 20 nt, synthetic construct
  source 1..20: mol_type = other RNA
ttcactgcaaggcactctct

SEQ ID NO: 627 - RNA, 20 nt, synthetic construct
  source 1..20: mol_type = other RNA
tgcatgggggtgagtggaaa

SEQ ID NO: 628 - RNA, 20 nt, synthetic construct
  source 1..20: mol_type = other RNA
atgcatgggggtgagtggaa

SEQ ID NO: 629 - RNA, 20 nt, synthetic construct
  source 1..20: mol_type = other RNA
ccaggagtgggccgcatttc

SEQ ID NO: 630 - RNA, 20 nt, synthetic construct
  source 1..20: mol_type = other RNA
accaggagtgggccgcattt

SEQ ID NO: 631 - RNA, 20 nt, synthetic construct
  source 1..20: mol_type = other RNA
ctggtgggaaatagaccccg

SEQ ID NO: 632 - RNA, 20 nt, synthetic construct
  source 1..20: mol_type = other RNA
cctggtgggaaatagacccc

SEQ ID NO: 633 - RNA, 20 nt, synthetic construct
  source 1..20: mol_type = other RNA
gcgttggcaggaggatcctg

SEQ ID NO: 634 - RNA, 20 nt, synthetic construct
  source 1..20: mol_type = other RNA
agcgttggcaggaggatcct

SEQ ID NO: 635 - RNA, 20 nt, synthetic construct
  source 1..20: mol_type = other RNA
tacttctctatccgcctctt

SEQ ID NO: 636 - RNA, 20 nt, synthetic construct
  source 1..20: mol_type = other RNA
ctacttctctatccgcctct

SEQ ID NO: 637 - RNA, 20 nt, synthetic construct
  source 1..20: mol_type = other RNA
tgttactgagactgggaaga

SEQ ID NO: 638 - RNA, 20 nt, synthetic construct
  source 1..20: mol_type = other RNA
ctgttactgagactgggaag

SEQ ID NO: 639 - RNA, 20 nt, synthetic construct
  source 1..20: mol_type = other RNA
agggtctgtaaggagtactg

SEQ ID NO: 640 - RNA, 20 nt, synthetic construct
  source 1..20: mol_type = other RNA
aagggtctgtaaggagtact

SEQ ID NO: 641 - RNA, 20 nt, synthetic construct
  source 1..20: mol_type = other RNA
tgtatttgggagtatgggag

SEQ ID NO: 642 - RNA, 20 nt, synthetic construct
  source 1..20: mol_type = other RNA
gtgtatttgggagtatggga

SEQ ID NO: 643 - RNA, 20 nt, synthetic construct
  source 1..20: mol_type = other RNA
ttaccaatcctctgtaacat

SEQ ID NO: 644 - RNA, 20 nt, synthetic construct
  source 1..20: mol_type = other RNA
gttaccaatcctctgtaaca

SEQ ID NO: 645 - RNA, 20 nt, synthetic construct
  source 1..20: mol_type = other RNA
ggtctcccctttctcattaa

SEQ ID NO: 646 - RNA, 20 nt, synthetic construct
  source 1..20: mol_type = other RNA
tggtctcccctttctcatta

SEQ ID NO: 647 - RNA, 20 nt, synthetic construct
  source 1..20: mol_type = other RNA
ttcatgagattgctttcgca

SEQ ID NO: 648 - RNA, 20 nt, synthetic construct
  source 1..20: mol_type = other RNA
gttcatgagattgctttcgc

SEQ ID NO: 649 - RNA, 20 nt, synthetic construct
  source 1..20: mol_type = other RNA
caacattcaactatggagct

SEQ ID NO: 650 - RNA, 20 nt, synthetic construct
  source 1..20: mol_type = other RNA
ccaacattcaactatggagc

SEQ ID NO: 651 - RNA, 20 nt, synthetic construct
  source 1..20: mol_type = other RNA
gtgggcaggtttggagttcc

SEQ ID NO: 652 - RNA, 21 nt, synthetic construct
  source 1..21: mol_type = other RNA
ctcccctatcgacttggcttt

SEQ ID NO: 653 - RNA, 20 nt, synthetic construct
  source 1..20: mol_type = other RNA
gcaaactgcttgcatcatgg

SEQ ID NO: 654 - RNA, 21 nt, synthetic construct
  source 1..21: mol_type = other RNA
aacttcatattacccaggctg

SEQ ID NO: 655 - RNA, 21 nt, synthetic construct
  source 1..21: mol_type = other RNA
aaagaatgtcctacctgtcgg

SEQ ID NO: 656 - RNA, 20 nt, synthetic construct
  source 1..20: mol_type = other RNA
ctgcagtctagtcaaggggg

SEQ ID NO: 657 - RNA, 20 nt, synthetic construct
  source 1..20: mol_type = other RNA
tggaaacacactttgtgggg

SEQ ID NO: 658 - RNA, 21 nt, synthetic construct
  source 1..21: mol_type = other RNA
acatggcacacagaacaatgg

SEQ ID NO: 659 - RNA, 21 nt, synthetic construct
  source 1..21: mol_type = other RNA
acttctcagacttcccattcc

SEQ ID NO: 660 - RNA, 21 nt, synthetic construct
  source 1..21: mol_type = other RNA
cccagagtctctgattacagt

SEQ ID NO: 661 - RNA, 21 nt, synthetic construct
  source 1..21: mol_type = other RNA
acccttcctgacattgcatct

SEQ ID NO: 662 - RNA, 21 nt, synthetic construct
  source 1..21: mol_type = other RNA
ttccacaaagctctgaattta

SEQ ID NO: 663 - RNA, 20 nt, synthetic construct
  source 1..20: mol_type = other RNA
tgttggagaagaactgaaat

SEQ ID NO: 664 - RNA, 21 nt, synthetic construct
  source 1..21: mol_type = other RNA
ttcagaggtctaccactggtg

SEQ ID NO: 665 - RNA, 21 nt, synthetic construct
  source 1..21: mol_type = other RNA
catacataaggggagtccatc

SEQ ID NO: 666 - RNA, 21 nt, synthetic construct
  source 1..21: mol_type = other RNA
ttctatggcatctttggaagc

SEQ ID NO: 667 - RNA, 21 nt, synthetic construct
  source 1..21: mol_type = other RNA
aactgtactgctcttccaacg

SEQ ID NO: 668 - RNA, 21 nt, synthetic construct
  source 1..21: mol_type = other RNA
ctgtttccactggcagtccat

SEQ ID NO: 669 - RNA, 21 nt, synthetic construct
  source 1..21: mol_type = other RNA
atactctctcttgatgagctt

SEQ ID NO: 670 - RNA, 20 nt, synthetic construct
  source 1..20: mol_type = other RNA
caagtacatcacaagatatg

SEQ ID NO: 671 - RNA, 21 nt, synthetic construct
  source 1..21: mol_type = other RNA
aattccttgcttcccttcttt

SEQ ID NO: 672 - RNA, 21 nt, synthetic construct
  source 1..21: mol_type = other RNA
taggcatcccttccaccccag

SEQ ID NO: 673 - RNA, 21 nt, synthetic construct
  source 1..21: mol_type = other RNA
ttaaatttgagttgcatgggg

SEQ ID NO: 674 - RNA, 21 nt, synthetic construct
  source 1..21: mol_type = other RNA
ccagatatgccaacatggttt

SEQ ID NO: 675 - RNA, 20 nt, synthetic construct
  source 1..20: mol_type = other RNA
ccagcaatccgctccgtgtc

SEQ ID NO: 676 - RNA, 20 nt, synthetic construct
  source 1..20: mol_type = other RNA
ataggcacccggtaaatatt

SEQ ID NO: 677 - RNA, 20 nt, synthetic construct
  source 1..20: mol_type = other RNA
atgcgatccccttaaaaatc

SEQ ID NO: 678 - RNA, 20 nt, synthetic construct
  source 1..20: mol_type = other RNA
gtgattattccaagagttag

SEQ ID NO: 679 - RNA, 20 nt, synthetic construct
  source 1..20: mol_type = other RNA
tccaaaatgtaagattactt

SEQ ID NO: 680 - RNA, 20 nt, synthetic construct
  source 1..20: mol_type = other RNA
agaaagagaattgggttctg

SEQ ID NO: 681 - RNA, 20 nt, synthetic construct
  source 1..20: mol_type = other RNA
cagtattctggggtaagctc

SEQ ID NO: 682 - RNA, 20 nt, synthetic construct
  source 1..20: mol_type = other RNA
aggcagccgccaatttatcg

SEQ ID NO: 683 - RNA, 20 nt, synthetic construct
  source 1..20: mol_type = other RNA
caggcagtcgtactacaagg

SEQ ID NO: 684 - RNA, 20 nt, synthetic construct
  source 1..20: mol_type = other RNA
atgtgtgtgtatacatagtc

SEQ ID NO: 685 - RNA, 20 nt, synthetic construct
  source 1..20: mol_type = other RNA
tgagttgcatggggcatact

SEQ ID NO: 686 - RNA, 20 nt, synthetic construct
  source 1..20: mol_type = other RNA
tagcaaagccatttcatgaa

SEQ ID NO: 687 - RNA, 20 nt, synthetic construct
  source 1..20: mol_type = other RNA
ccacagacccttggtttata

SEQ ID NO: 688 - RNA, 20 nt, synthetic construct
  source 1..20: mol_type = other RNA
tttggtcactctccatccag

SEQ ID NO: 689 - RNA, 20 nt, synthetic construct
  source 1..20: mol_type = other RNA
gagtgaaagaatgactctct

SEQ ID NO: 690 - RNA, 20 nt, synthetic construct
  source 1..20: mol_type = other RNA
gactcatttggctacagtgc

SEQ ID NO: 691 - RNA, 20 nt, synthetic construct
  source 1..20: mol_type = other RNA
ttcaagaatggcactatctc

SEQ ID NO: 692 - RNA, 20 nt, synthetic construct
  source 1..20: mol_type = other RNA
ggcaccaagcaccatcatcc

SEQ ID NO: 693 - RNA, 20 nt, synthetic construct
  source 1..20: mol_type = other RNA
gttgcaggaacctgtacata

SEQ ID NO: 694 - RNA, 18 nt, synthetic construct
  source 1..18: mol_type = other RNA
caggttgcgtgtaccctg

SEQ ID NO: 695 - RNA, 19 nt, synthetic construct
  source 1..19: mol_type = other RNA
ccaggttgcgtgtaccctg

SEQ ID NO: 696 - RNA, 21 nt, synthetic construct
  source 1..21: mol_type = other RNA
ttccaggttgcgtgtaccctg

SEQ ID NO: 697 - RNA, 22 nt, synthetic construct
  source 1..22: mol_type = other RNA
cttccaggttgcgtgtaccctg

SEQ ID NO: 698 - RNA, 23 nt, synthetic construct
  source 1..23: mol_type = other RNA
tcttccaggttgcgtgtaccctg

SEQ ID NO: 699 - RNA, 24 nt, synthetic construct
  source 1..24: mol_type = other RNA
atcttccaggttgcgtgtaccctg

SEQ ID NO: 700 - RNA, 25 nt, synthetic construct
  source 1..25: mol_type = other RNA
gatcttccaggttgcgtgtaccctg

SEQ ID NO: 701 - RNA, 18 nt, synthetic construct
  source 1..18: mol_type = other RNA
agccgggagggttagcat

SEQ ID NO: 702 - RNA, 19 nt, synthetic construct
  source 1..19: mol_type = other RNA
cagccgggagggttagcat

SEQ ID NO: 703 - RNA, 21 nt, synthetic construct
  source 1..21: mol_type = other RNA
atcagccgggagggttagcat

SEQ ID NO: 704 - RNA, 22 nt, synthetic construct
  source 1..22: mol_type = other RNA
tatcagccgggagggttagcat

SEQ ID NO: 705 - RNA, 23 nt, synthetic construct
  source 1..23: mol_type = other RNA
ttatcagccgggagggttagcat

SEQ ID NO: 706 - RNA, 24 nt, synthetic construct
  source 1..24: mol_type = other RNA
tttatcagccgggagggttagcat

SEQ ID NO: 707 - RNA, 25 nt, synthetic construct
  source 1..25: mol_type = other RNA
atttatcagccgggagggttagcat

SEQ ID NO: 708 - RNA, 18 nt, synthetic construct
  source 1..18: mol_type = other RNA
actgcaaggcactctcta

SEQ ID NO: 709 - RNA, 19 nt, synthetic construct
  source 1..19: mol_type = other RNA
cactgcaaggcactctcta

SEQ ID NO: 710 - RNA, 21 nt, synthetic construct
  source 1..21: mol_type = other RNA
ttcactgcaaggcactctcta

SEQ ID NO: 711 - RNA, 22 nt, synthetic construct
  source 1..22: mol_type = other RNA
attcactgcaaggcactctcta

SEQ ID NO: 712 - RNA, 23 nt, synthetic construct
  source 1..23: mol_type = other RNA
tattcactgcaaggcactctcta

SEQ ID NO: 713 - RNA, 24 nt, synthetic construct
  source 1..24: mol_type = other RNA
ctattcactgcaaggcactctcta

SEQ ID NO: 714 - RNA, 25 nt, synthetic construct
  source 1..25: mol_type = other RNA
actattcactgcaaggcactctcta

SEQ ID NO: 715 - RNA, 18 nt, synthetic construct
  source 1..18: mol_type = other RNA
aggcacccggtaaatatt

SEQ ID NO: 716 - RNA, 19 nt, synthetic construct
  source 1..19: mol_type = other RNA
taggcacccggtaaatatt

SEQ ID NO: 717 - RNA, 21 nt, synthetic construct
  source 1..21: mol_type = other RNA
aataggcacccggtaaatatt

SEQ ID NO: 718 - RNA, 22 nt, synthetic construct
  source 1..22: mol_type = other RNA
aaataggcacccggtaaatatt

SEQ ID NO: 719 - RNA, 23 nt, synthetic construct
  source 1..23: mol_type = other RNA
aaaataggcacccggtaaatatt

SEQ ID NO: 720 - RNA, 24 nt, synthetic construct
  source 1..24: mol_type = other RNA
aaaaataggcacccggtaaatatt

SEQ ID NO: 721 - RNA, 25 nt, synthetic construct
  source 1..25: mol_type = other RNA
aaaaaataggcacccggtaaatatt

SEQ ID NO: 722 - RNA, 21 nt, synthetic construct
  source 1..21: mol_type = other RNA
gaccatgcagaggtcgcctct

SEQ ID NO: 723 - RNA, 21 nt, synthetic construct
  source 1..21: mol_type = other RNA
cagcacatgggaatttcacag

SEQ ID NO: 724 - RNA, 21 nt, synthetic construct
  source 1..21: mol_type = other RNA
gctgggctgttctaactgcag

SEQ ID NO: 725 - RNA, 21 nt, synthetic construct
  source 1..21: mol_type = other RNA
ggtgggcaggtttggagttcc

SEQ ID NO: 726 - RNA, 21 nt, synthetic construct
  source 1..21: mol_type = other RNA
ctacttctctatccgcctctt

SEQ ID NO: 727 - RNA, 21 nt, synthetic construct
  source 1..21: mol_type = other RNA
aagggtctgtaaggagtactg

SEQ ID NO: 728 - RNA, 21 nt, synthetic construct
  source 1..21: mol_type = other RNA
gtgtatttgggagtatgggag

SEQ ID NO: 729 - RNA, 21 nt, synthetic construct
  source 1..21: mol_type = other RNA
ttaggctgcccttcttggggg

SEQ ID NO: 730 - RNA, 21 nt, synthetic construct
  source 1..21: mol_type = other RNA
gcaggcttgatcaatggcatg

SEQ ID NO: 731 - RNA, 21 nt, synthetic construct
  source 1..21: mol_type = other RNA
gagcctgagacacaaacgaga

SEQ ID NO: 732 - RNA, 21 nt, synthetic construct
  source 1..21: mol_type = other RNA
cgtccagactcggttcttgag

SEQ ID NO: 733 - RNA, 21 nt, synthetic construct
  source 1..21: mol_type = other RNA
gctaaccgaggcgctggaagg

SEQ ID NO: 734 - RNA, 21 nt, synthetic construct
  source 1..21: mol_type = other RNA
gactccaagtactgtctggtg

SEQ ID NO: 735 - RNA, 21 nt, synthetic construct
  source 1..21: mol_type = other RNA
ccttaaaagcctcaaacgaac

SEQ ID NO: 736 - RNA, 21 nt, synthetic construct
  source 1..21: mol_type = other RNA
tgtattgtgaaaaggcattac

SEQ ID NO: 737 - RNA, 21 nt, synthetic construct
  source 1..21: mol_type = other RNA
ggctagatctgcctgactgta

SEQ ID NO: 738 - RNA, 21 nt, synthetic construct
  source 1..21: mol_type = other RNA
tcgaaattggtgctggctctg

SEQ ID NO: 739 - RNA, 21 nt, synthetic construct
  source 1..21: mol_type = other RNA
gggacttcctaaagcagttct

SEQ ID NO: 740 - RNA, 21 nt, synthetic construct
  source 1..21: mol_type = other RNA
tctgatcaatcgcctcataga

SEQ ID NO: 741 - RNA, 21 nt, synthetic construct
  source 1..21: mol_type = other RNA
ctcagggctaaacaaacccag

SEQ ID NO: 742 - RNA, 21 nt, synthetic construct
  source 1..21: mol_type = other RNA
acgtctctgatgtcagctgta

SEQ ID NO: 743 - RNA, 21 nt, synthetic construct
  source 1..21: mol_type = other RNA
gctgcagtctagtcaaggggg

SEQ ID NO: 744 - RNA, 21 nt, synthetic construct
  source 1..21: mol_type = other RNA
gtggaaacacactttgtgggg

SEQ ID NO: 745 - RNA, 21 nt, synthetic construct
  source 1..21: mol_type = other RNA
ggcaaactgcttgcatcatgg

SEQ ID NO: 746 - RNA, 20 nt, synthetic construct
  source 1..20: mol_type = other RNA
cttaaaagcctcaaacgaac

SEQ ID NO: 747 - RNA, 20 nt, synthetic construct
  source 1..20: mol_type = other RNA
gtattgtgaaaaggcattac

SEQ ID NO: 748 - RNA, 20 nt, synthetic construct
  source 1..20: mol_type = other RNA
gctagatctgcctgactgta

SEQ ID NO: 749 - RNA, 20 nt, synthetic construct
  source 1..20: mol_type = other RNA
cgaaattggtgctggctctg

SEQ ID NO: 750 - RNA, 21 nt, synthetic construct
  source 1..21: mol_type = other RNA
ccgacggactccaagagcaca

SEQ ID NO: 751 - RNA, 21 nt, synthetic construct
  source 1..21: mol_type = other RNA
ttgagacacagggtgcaggct

SEQ ID NO: 752 - RNA, 21 nt, synthetic construct
  source 1..21: mol_type = other RNA
gtgcaggctggtacttccaag

SEQ ID NO: 753 - RNA, 21 nt, synthetic construct
  source 1..21: mol_type = other RNA
ggttacccaactccactctca

SEQ ID NO: 754 - RNA, 21 nt, synthetic construct
  source 1..21: mol_type = other RNA
gtgttggagaagaactgaaat

SEQ ID NO: 755 - RNA, 21 nt, synthetic construct
  source 1..21: mol_type = other RNA
gatgtggcctctccttccaga

SEQ ID NO: 756 - RNA, 21 nt, synthetic construct
  source 1..21: mol_type = other RNA
cataataggcagaatcccagg

SEQ ID NO: 757 - RNA, 21 nt, synthetic construct
  source 1..21: mol_type = other RNA
agtgagaaggtggttgagaaa

SEQ ID NO: 758 - RNA, 21 nt, synthetic construct
  source 1..21: mol_type = other RNA
atgcatgggggtgagtggaaa

SEQ ID NO: 759 - RNA, 21 nt, synthetic construct
  source 1..21: mol_type = other RNA
accaggagtgggccgcatttc

SEQ ID NO: 760 - RNA, 21 nt, synthetic construct
  source 1..21: mol_type = other RNA
cctggtgggaaatagaccccg

SEQ ID NO: 761 - RNA, 21 nt, synthetic construct
  source 1..21: mol_type = other RNA
agcgttggcaggaggatcctg

SEQ ID NO: 762 - RNA, 21 nt, synthetic construct
  source 1..21: mol_type = other RNA
ctgttactgagactgggaaga

SEQ ID NO: 763 - RNA, 21 nt, synthetic construct
  source 1..21: mol_type = other RNA
tggtctcccctttctcattaa

SEQ ID NO: 764 - RNA, 21 nt, synthetic construct
  source 1..21: mol_type = other RNA
gttcatgagattgctttcgca

SEQ ID NO: 765 - RNA, 20 nt, synthetic construct
  source 1..20: mol_type = other RNA
ctctgtctagagcagcaagc

SEQ ID NO: 766 - RNA, 20 nt, synthetic construct
  source 1..20: mol_type = other RNA
gtccaggagtcattggaatc

SEQ ID NO: 767 - RNA, 20 nt, synthetic construct
  source 1..20: mol_type = other RNA
agcctttgtagcacaggaaa

SEQ ID NO: 768 - RNA, 20 nt, synthetic construct
  source 1..20: mol_type = other RNA
aatagcacgctccttattaa

SEQ ID NO: 769 - RNA, 20 nt, synthetic construct
  source 1..20: mol_type = other RNA
gctgtattagactaaagcct

SEQ ID NO: 770 - RNA, 20 nt, synthetic construct
  source 1..20: mol_type = other RNA
ccaagccagagattgtgtga

SEQ ID NO: 771 - RNA, 20 nt, synthetic construct
  source 1..20: mol_type = other RNA
actgcttggccttgtggcta

SEQ ID NO: 772 - RNA, 20 nt, synthetic construct
  source 1..20: mol_type = other RNA
aggcaaagggtacagaaacg

SEQ ID NO: 773 - RNA, 20 nt, synthetic construct
  source 1..20: mol_type = other RNA
attcacctgaaagtgtgcag

SEQ ID NO: 774 - RNA, 20 nt, synthetic construct
  source 1..20: mol_type = other RNA
aaggagactgacggtcacat

SEQ ID NO: 775 - RNA, 20 nt, synthetic construct
  source 1..20: mol_type = other RNA
aatggcagatctggcccagc

SEQ ID NO: 776 - RNA, 20 nt, synthetic construct
  source 1..20: mol_type = other RNA
aatagcaccagggaggtatg

SEQ ID NO: 777 - RNA, 20 nt, synthetic construct
  source 1..20: mol_type = other RNA
ccacactgaaaatgaatgag

SEQ ID NO: 778 - RNA, 20 nt, synthetic construct
  source 1..20: mol_type = other RNA
cctgaaagcatgtaagctac

SEQ ID NO: 779 - RNA, 20 nt, synthetic construct
  source 1..20: mol_type = other RNA
gccacatttataccattcct

SEQ ID NO: 780 - RNA, 20 nt, synthetic construct
  source 1..20: mol_type = other RNA
ctgttgctacctctacataa

SEQ ID NO: 781 - RNA, 20 nt, synthetic construct
  source 1..20: mol_type = other RNA
ccttctcaagctgtaggcaa

SEQ ID NO: 782 - RNA, 20 nt, synthetic construct
  source 1..20: mol_type = other RNA
actgagggcaaacccagcct

SEQ ID NO: 783 - RNA, 20 nt, synthetic construct
  source 1..20: mol_type = other RNA
tgtgtccaaacctcaaccca

SEQ ID NO: 784 - RNA, 20 nt, synthetic construct
  source 1..20: mol_type = other RNA
attagttgattctagggaat

SEQ ID NO: 785 - RNA, 18 nt, synthetic construct
  source 1..18: mol_type = other RNA
tgtattagactaaagcct

SEQ ID NO: 786 - RNA, 19 nt, synthetic construct
  source 1..19: mol_type = other RNA
ctgtattagactaaagcct

SEQ ID NO: 787 - RNA, 21 nt, synthetic construct
  source 1..21: mol_type = other RNA
agctgtattagactaaagcct

SEQ ID NO: 788 - RNA, 22 nt, synthetic construct
  source 1..22: mol_type = other RNA
cagctgtattagactaaagcct

SEQ ID NO: 789 - RNA, 23 nt, synthetic construct
  source 1..23: mol_type = other RNA
tcagctgtattagactaaagcct

SEQ ID NO: 790 - RNA, 24 nt, synthetic construct
  source 1..24: mol_type = other RNA
atcagctgtattagactaaagcct

SEQ ID NO: 791 - RNA, 25 nt, synthetic construct
  source 1..25: mol_type = other RNA
tatcagctgtattagactaaagcct

SEQ ID NO: 792 - RNA, 18 nt, synthetic construct
  source 1..18: mol_type = other RNA
tgagggcaaacccagcct

SEQ ID NO: 793 - RNA, 19 nt, synthetic construct
  source 1..19: mol_type = other RNA
ctgagggcaaacccagcct

SEQ ID NO: 794 - RNA, 21 nt, synthetic construct
  source 1..21: mol_type = other RNA
aactgagggcaaacccagcct

SEQ ID NO: 795 - RNA, 22 nt, synthetic construct
  source 1..22: mol_type = other RNA
gaactgagggcaaacccagcct

SEQ ID NO: 796 - RNA, 23 nt, synthetic construct
  source 1..23: mol_type = other RNA
agaactgagggcaaacccagcct

SEQ ID NO: 797 - RNA, 24 nt, synthetic construct
  source 1..24: mol_type = other RNA
cagaactgagggcaaacccagcct

SEQ ID NO: 798 - RNA, 25 nt, synthetic construct
  source 1..25: mol_type = other RNA
gcagaactgagggcaaacccagcct

SEQ ID NO: 799 - RNA, 24 nt, synthetic construct
  source 1..24: mol_type = other RNA
atatctctgtctagagcagcaagc

SEQ ID NO: 800 - RNA, 24 nt, synthetic construct
  source 1..24: mol_type = other RNA
aggagtccaggagtcattggaatc

SEQ ID NO: 801 - RNA, 24 nt, synthetic construct
  source 1..24: mol_type = other RNA
ttctagcctttgtagcacaggaaa

SEQ ID NO: 802 - RNA, 24 nt, synthetic construct
  source 1..24: mol_type = other RNA
tcttaatagcacgctccttattaa

SEQ ID NO: 803 - RNA, 24 nt, synthetic construct
  source 1..24: mol_type = other RNA
gcaaccaagccagagattgtgtga

SEQ ID NO: 804 - RNA, 24 nt, synthetic construct
  source 1..24: mol_type = other RNA
atgcactgcttggccttgtggcta

SEQ ID NO: 805 - RNA, 24 nt, synthetic construct
  source 1..24: mol_type = other RNA
gtgaaggcaaagggtacagaaacg

SEQ ID NO: 806 - RNA, 24 nt, synthetic construct
  source 1..24: mol_type = other RNA
acgtattcacctgaaagtgtgcag

SEQ ID NO: 807 - RNA, 24 nt, synthetic construct
  source 1..24: mol_type = other RNA
caggaaggagactgacggtcacat

SEQ ID NO: 808 - RNA, 24 nt, synthetic construct
  source 1..24: mol_type = other RNA
acaaaatggcagatctggcccagc

SEQ ID NO: 809 - RNA, 24 nt, synthetic construct
  source 1..24: mol_type = other RNA
gagtaatagcaccagggaggtatg

SEQ ID NO: 810 - RNA, 24 nt, synthetic construct
  source 1..24: mol_type = other RNA
agtcccacactgaaaatgaatgag

SEQ ID NO: 811 - RNA, 24 nt, synthetic construct
  source 1..24: mol_type = other RNA
tgggcctgaaagcatgtaagctac

SEQ ID NO: 812 - RNA, 24 nt, synthetic construct
  source 1..24: mol_type = other RNA
agaggccacatttataccattcct

SEQ ID NO: 813 - RNA, 24 nt, synthetic construct
  source 1..24: mol_type = other RNA
attcctgttgctacctctacataa

SEQ ID NO: 814 - RNA, 24 nt, synthetic construct
  source 1..24: mol_type = other RNA
cccaccttctcaagctgtaggcaa

SEQ ID NO: 815 - RNA, 24 nt, synthetic construct
  source 1..24: mol_type = other RNA
agagtgtgtccaaacctcaaccca

SEQ ID NO: 816 - RNA, 24 nt, synthetic construct
  source 1..24: mol_type = other RNA
ttttattagttgattctagggaat

SEQ ID NO: 817 - RNA, 20 nt, synthetic construct
  source 1..20: mol_type = other RNA
cacaccattcccttccagat

SEQ ID NO: 818 - RNA, 20 nt, synthetic construct
  source 1..20: mol_type = other RNA
cacaaccaagaagtgaccat

SEQ ID NO: 819 - RNA, 20 nt, synthetic construct
  source 1..20: mol_type = other RNA
tgacaaagccgtggtcctta

SEQ ID NO: 820 - RNA, 20 nt, synthetic construct
  source 1..20: mol_type = other RNA
gaactaatgcccaaatgcca

SEQ ID NO: 821 - RNA, 20 nt, synthetic construct
  source 1..20: mol_type = other RNA
gccatggcatagtgcatgtg

SEQ ID NO: 822 - RNA, 20 nt, synthetic construct
  source 1..20: mol_type = other RNA
atggaaacagtcagactggt

SEQ ID NO: 823 - RNA, 20 nt, synthetic construct
  source 1..20: mol_type = other RNA
attagctggatgtgatgtcg

SEQ ID NO: 824 - RNA, 20 nt, synthetic construct
  source 1..20: mol_type = other RNA
agtgtattccttggccagat

SEQ ID NO: 825 - RNA, 20 nt, synthetic construct
  source 1..20: mol_type = other RNA
agtggtggtgcccaatcaga

SEQ ID NO: 826 - RNA, 20 nt, synthetic construct
  source 1..20: mol_type = other RNA
atcagccaggcatggtagcg

SEQ ID NO: 827 - RNA, 20 nt, synthetic construct
  source 1..20: mol_type = other RNA
gataaatgcttgaggtgatg

SEQ ID NO: 828 - RNA, 20 nt, synthetic construct
  source 1..20: mol_type = other RNA
aaagcctctatcacattcac

SEQ ID NO: 829 - RNA, 20 nt, synthetic construct
  source 1..20: mol_type = other RNA
cctcattcccacattatgta

SEQ ID NO: 830 - RNA, 20 nt, synthetic construct
  source 1..20: mol_type = other RNA
gggagatcttccaggttgcg

SEQ ID NO: 831 - RNA, 20 nt, synthetic construct
  source 1..20: mol_type = other RNA
ggtgctagctgtaattgcat

SEQ ID NO: 832 - RNA, 20 nt, synthetic construct
  source 1..20: mol_type = other RNA
gaagaaagatgataatgagc

SEQ ID NO: 833 - RNA, 20 nt, synthetic construct
  source 1..20: mol_type = other RNA
taccataccgactttcgccc

SEQ ID NO: 834 - RNA, 20 nt, synthetic construct
  source 1..20: mol_type = other RNA
caaaacccttgctcaaggtg

SEQ ID NO: 835 - RNA, 20 nt, synthetic construct
  source 1..20: mol_type = other RNA
cacactaggactgcaaaggc

SEQ ID NO: 836-850 - skipped (15 entries)

SEQ ID NO: 851 - RNA, 4445 nt, synthetic construct
  source 1..4445: mol_type = other RNA
aggcttccttttgtgcagctcttgggttttttgtggcttccttcgttattggagccaggcctacaccccagcaaccgccaccatggcccccaagaagaagaggaaggtggggcagaaggacttctacctcgggctggacatcgggacggacagcgtggggtacgccgtgacggacgagcagtacaacctgctcaagttctccggcgacgccgcctggggcgtccacctcttcgacgaggcggagctgtcccaggagcggcgggccttccgggtggcccgccgccggctcgaccggcggaagcagcgggtcatgctgctccaggagctcttcgccccggccatccgggccgtggacgccgacttctacaagcggctccaggcctcggacctcttccgggacgaggccggggaccgcttcccgatcttcaacgacgtggactacacggaccgggactactacaaggcgtaccccacgatccaccacctcatctgcgacctcatggcggacgagacggcccacgatgtccggctcgtgtacctggcctgcgcctggctggtgtccaaccgggggcacttcctgtccaacctggacaaggagaacatctcggccctgaagaacttcgacaaggtgtactccgagttcgagcacttcttcaccgacaacgggtacgcctacccgtgggccgaggccgaccggcgcacgatcggcgagatcctcaagaagaagaccacggtgacggccaagaacaaggagctgacgctcgccttcaccgggggcgggatggcccccaaggaggcgagcgaggacttcccgttcggccagcgggccatcatcaagctgctggccggcgggacggcccagctcaaggagctcttcgaccaggaggcctacgccgagttcggcgcggtctccctcaacttcgacgacgacaagttggaggagatcgcgggcaacctgggcgacgacttcgccctcatcaccgccctgcggcaggtcttcgactggtcggtgctggtcgaggccatcggggacgccgccagcatcagcgaggccaaggtggagacctaccgccagcacaaggcggacctggccatcctgaagcggatcatcaagaactaccgccccgagaagtacgacgaggtcttccgggagatcgggaaggccaactacgcggcctacgcgtaccactccaacaagaaggccgacgccaagttcaagaaggtggaccgcgaggccttctcgaagttcatcacgggcatcgtgaaggacatcacgcccaaggcggaggacgaggagatcctcgccgacatgcggaaccgcctcgacctccgcaccttcctgcccaagcagaagaacaccgacaaccgggtgatcccccaccagctctaccagtacgagctgcacgagatcctcaagaacgcggaggggtacctcccgttcttgacggagaaggacgagtccgggctgtcggtgtccgacaagatccggagcatcttcgcgttcaagatcccctacttcgtggggcccctgaacgagaagagcgaccacgcgtggatcgtccgcaaggcggggaagatctacccgtggaacttcgaggacatcgtcgacctggacgcgtccgaggaggggttcatccggcggatgacgaaccagtgcacctacctgccgggcgagcccgtcctcccgaaggacagcctcctgtaccacaagttcaccgtgctgaacgagatcaacaacctctcgatccacggtgagcggatctcggtggagctgaagcagcagatctactcggatctgttcctgaacaagaagaaggtcacccggaagcggctccgggagtacctgatcgtgaacggggtcgtcgagaaggacgacaccgacgcgatcacggggatcgacgaggagatcaagtccaacctgctgccccagatctcgttccggcggctgctggacgagggcacgctgtcggaggaggacgtcgagaagatcatcgagcgctcgacgttctccgacgacaagacgcgcctgaagaagtggctggcgcgggagtacccgcagctcaacagcaaggacgtggactacatccggtccttgcggctgcgggacttcgggcgcctgtcgcaggccttcctggagggcatcatcgcggccgaccggagcaccggggaggccttcaccatcatcagcgcgctctggaacacccagaagaacctgatggagctgctctcggaccagttcaccttcgccgagacgatcgagcgcttccgggaggactactaccgggagcacccggtgagcctctcggagcgcatggacgagatgtacttgtccaactcggtgaagcggagcgtcttccggacgctcgacatcgtgaaggatgtcaagaaggccttcggggccccgaagaagatcttcgtggaggtcacccggggcgggtcgcccgaccagaagggcaagcggaccaagtcccggagccagcagctgcgggagctgtacgacaagtgccgggacgaggacctcccgctgctgaagcagcagctggaggccatgggggacgcggcggacagcaagctgcagtccgagaagctgttcctctactacctccagctggggaagtccgcgtactccgacaagcggatcccgctggaggccctggcctccaaggcctacgacatcgaccacatctacccgcaggccttcgtgaaggacgactccatcatcaacaacaaggtcctcgtcctgagcgaggagaacggggcgaagagcaacaactaccccatccaggggtccatccggcaccacatgcagggcttctggagctacctccaggaggtgggcctgatgtccaaggagaagtacaagcgcctcacccggagcaccccgttcacggaggaggagcggtacggcttcatcaaccgccagctgacgagcacgtcgcagtcgacgaaggcggtggccacgctcctcaaggagcacctgcccgagaccgagatcgtctactgcaaggcgcggctcgtcacggacttccggcaggccttcgacctgttcaagtcgcggcagtacaacgacctgcaccacgcggtcgacgcctacctgaacatcgtgacgggcaacgtgtacaacatgcggttcaccaagaacttcaacgtgcactcgcagtactcgatcaagaccgagacggtcttcacgcggcccgtgacgtacaagtcccagaccatctgggacggcatcgacatgctggccaaggtgaagtccatcgccaacaagaacaccgcccacatcacgaagtacgcgttcatgaagaagggcgggttcttcgaccagctgcccgtccgggcggcggacgggctcatcccccggaagaagcacctgcccacgcagaagtacggcgggtacaacaagccgggggtgatgttcttcatccccgtgaagtaccagctggggaagaagagcgagctgttcatcctccccgtggagctgctctgcgggaagcggttcctggcggacccggagttcgcccaggcctacgccgtgaagcggctcgagcggatcctcaagaagccggtcgaccagatcagcttcccgctcggcatgcggccctggaaggtcaacaccgtcctggccctggacggcttcaagtactgcatcacggggtcgtccaacgggggcacccggctgatcctccagccgatgatgtccttcagctccgcgccctactgggcgttctacctgaagaagctggaggtgttcgtggagaagaacgcgaacaacccccagcacgtctacgacgaggcgtacgacaaggtcaactgcgaggacaacctcaagctgtacgacctgtactgccagaagctgacgagcacgatctacagcaagcggatcaacagcccgctggacatcctgctccaggggcgggagaagttcagcgggctggacatcaagcagcaggcccaggccctgctgaacatccaccaggtgttcggcaggatcgccgggggctgcgacttgacgctcgtcggcggcaagaaggggtcggcggcgaccagcgcctcgtcggcgatctccaacctggggaagcggtaccaggacgtgcgggtctgggacaccagcccgtcggggctctggtccaagcggagccccaacctcctggacctgctcaagagacccgccgccaccaagaaggccggccaggccaagaagaagaaggactacaaggacgacgacgacaagtgatcttcacccagtctgtctcttagaatttatttcccactgacacaaacaagccattttgtctgcttgtataacccggatcctcaggaaaaaaaaaaaaaaaaaaaaaaaaaaaaaaaaaaaaaaaaaaaaaaaaaaaaaaaaaaaaatgcataaaaaaaaaaaaaaaaaaaaaaaaaaaaaaaaaaaaaaaaaaaaaaaaaaaaaaaaaaaa

SEQ ID NO: 852 - RNA, 4460 nt, synthetic construct
  source 1..4460: mol_type = other RNA
aggcttccttttgtgcagctcttgggttttttgtggcttccttcgttattggagccaggcctacaccccagcaaccgccaccatggcccccaagaagaagaggaaggtgaagcagaagtactacctcgggctggacatggggacgtccagcctggggtgggccgtgaccaacgagaagtactcgctgctccggaagaaggggaaggacctctggggcgtgcggctcttcgaggaggcgaagacggccgccgaccggcggtcctaccggaccgcccggcggcggctgcagcgggagaaggcccgcatcgggtacctccgggagctcttctcggaggagatcaacaagatcgacgcgggcttcttccagcggctggaggactccaagtaccacaaggaggacaagcgggagcaccagcccttcgccctcttcgccgacaagggctacacggaccgcgagtacttcgaggactaccccacgatcttccacctgcggaaggcgctgctggacatcgagaacgaggggaagaccttcgatgtccggctggtctacctggccatcctgaacatgttcaagcaccgggggcacttcctcaacgccaacctggacgacaagtccgggggcgacctcaaggagaagatccacatcctgacgtccatggcgaacaagctgttcgacgacatcagcttcaagaccgtggacatcaaggacatcgagcagatcctggccagcaaggactactcgaactcgacgcggctcgagaagctgctcgagctgttcgagctgtcgaagaccaagaacaaggtcgagacggagatcttcaagatgatctgcggcctgaaggggaccatctcgaagatcttcgcgaacgagagcatggacgaggaggcccagaagctctcgttctcgttccgggacgggaactacgacgagaagatcgtcgagatggaggaggcgctctcggaggagtcctacgagttcatcatgatcatgaagcaggtccacgactgggccgtgctcagcaacatcatgatgggcgaggagtacctctcggtggcgcgggtcaaggcctacgagaagcacaagaaggacctgaacatgctcaaggccctgctcaagaactactccatcaaggagtacaactccatgttccggatcatgaaggacaacaactactcgtcctacatcgggagcgtgatctcccaggagacgatccggcgcaaggggaagtacacgacggacgacttctacaagaacgtgaagtcgatcgtcctcaagtgcgaggagtgcaccgagaaggagtacatcctcagcgagatcgagaagaagacgttcctgcccaagcagaacacgacgtcgaactcggtcatcccgaaccaggtccacaagaaggagctgaagcggatcctcgagaacgcggccaagtacctcgagttcctgaacgacaaggacgacacggggctcaccgtgtcggagaagatcgtgcggctcttcgagttccagatcccgtactacgtggggccgctgagcaacggcgtctgcgacgggaagaacgtctggtccgtccggcgcgagaagggcgccgtgctgccgtggaacttcgaggagaagatcgacgtgaagcagagcagcgagaacttcatcaccaagctggtgaaccactgcacctacctcaacggggagaccgtcctccccaagaactcgctgctctacgagaagttcatggtcctgaacgagctgaacaacctgaagatcaacggggtgaagatcggggtggagctcaagcagagcatctacaacgacgtcttcaagaaggggaagaaggtcacggccaaggccctgatccagtacctgaagaacatcggggagatcgacgccaccgaggagacggtggtgtcggggatcgacggggacttcacgaaccggctcgcgaactacaagaagttcatcgagatcttcaaggtccccacgctcacctacgagcaggagcagatcgccgaggacatcatcttctactccaccgtgtacggggagtcgaagaagttcctcgaggagcggatcagggagaagtacaacgaggagctgtcggagaaccagatcaagcggatcctcggcctcaagttcaaggactggggccggctctcgaaggagctgctgctgctgcaggggatcgacaagcagaccggcgagatctccagcatcatcagcaagatgtggtcggacaactacaacctgatggagctgatcgccaccgacaagttctcgtacgggtacaacatcgagcagaagacctcgaagatcgagaaggtcctgtccgacatcgagtacagcgacctcgacgagatctacatctcggccccggtcaagcggatggtctggcagaccatcctcgtgctgaaggagctcgagaaggtcatgggctgcgagcccgagaagatcttcgtcgagatggcgcgggacgccaacgcgccgaagaagcggacggagtcccgcaagaagaagttcctcgagctctacaagacctgcaagaaggagtcccgggactggaaggaggagctcgaggacaccgaggagagcaagttccggtccaagaagctgtacctgtactacacccagaaggggcggtgcatgtacagcggggaggagatcgagctgaaggatctcttcaacgacaacctgtacgacatcgaccacatctacccgcggcacttcgtgaaggacgacagcatcgagaacaacctcgtgctggtccggaaggtggacaacgcccacaagtcggacgccgtgctggagtcgtcgatccgcaacaagatgtgcggcttctggaagatcctccgggaggggagcttcatcaccgacgagaagtacaagcgcctcatgcggaccgacgacttcagcgacgaggagcgggccggcttcatcagccggcagatcgtggagacgcggcaggggaccaaggtcatcgccgacctcttcacgaagacgttccccgagagcgagatcatctacgtgaaggcggggaacgtctcggacttccggaagaagttcgacttcctgaagtgccgcatcgtgaacgacttccaccacgcgcaggacgcgtacctgaacatcgtggtggggaacgtgtacaacacgaagttcacgcagaacccgatgaacttcatccgggagtacaacaaggaccccaaggccaacaagtaccacatggacaagctcttcgagtacccggtgtcccggaacggccgggacgcctgggtgacgaagaacgcggagtccatctgcatggtcaagaagatgatggagaagaacacgccgctcatcacgcggatgaactacgagagccacggcgggatcgccgaccagacgatctactccgccgaggacgcccagaaggccaagggcaaggggtacatcagcatcaagtcctccgacggcaacctcctcgacacctgcaagtacggcgggatgaagaagtacaccggcacgtacttcctcctgctggagcacaccaagaaggagaagcggatccggaccatcgaggccatgccgctctacctgaaggacaagctcaacacgcgggagaagatcgagaagtacttcgagcagtccgtggacttcgcctacgagcagccgaaggtgatcctggacaagatcaagatgtactccctgatcaaggtggacgggttctacctctacctgacggggcggacggggaaccagctctccgtctgcaacgcggtgcagatgagcctgtccgccgggatggtgaagtacgtccggaagatctcgatcgccaacgagcggtacgccgccgacaaggagttcgagaaggacgagaacatctccgtccagaagaacctcgagctctacgagatcctgaaggagaagcacctcaaccagatctacggcaagcggccgaaccccgtcggcgagaagatcgagaaggggatcgagaagttccggagcctcagcgtccggaagcagatctacgtgctgctgcagatcctgcagctgtcccagctgagcaaccagggggccgacctcctggagatcggcggggagaagaagaccgggacgtcgaagctcaacaagaacatcacggagaagcaggagttcaagctcatcaaccagtccgtgacggggctctacgagaacgagatcgacctgctccggatcaagagacccgccgccaccaagaaggccggccaggccaagaagaagaaggactacaaggacgacgacgacaagtgatcttcacccagtctgtctcttagaatttatttcccactgacacaaacaagccattttgtctgcttgtataacccggatcctcaggaaaaaaaaaaaaaaaaaaaaaaaaaaaaaaaaaaaaaaaaaaaaaaaaaaaaaaaaaaaaatgcataaaaaaaaaaaaaaaaaaaaaaaaaaaaaaaaaaaaaaaaaaaaaaaaaaaaaaaaaaaa

SEQ ID NO: 853 - RNA, 4550 nt, synthetic construct
  source 1..4550: mol_type = other RNA
aggtctagagggaaataagagagaaaagaagagtaagaagaaatataagaccccggcgccgccaccatggcccctaagaaaaagcggaaggtggacaagaagtacagcatcggcctggacatcggcaccaattctgttggctgggccgtgatcaccgacgagtacaaggtgcccagcaagaaattcaaggtgctgggcaacaccgaccggcacagcatcaagaagaatctgatcggcgccctgctgttcgattctggcgaaacagccgaggccaccagactgaagagaaccgccagaagaagatacacccggcggaagaaccggatctgctacctgcaagagatcttcagcaacgagatggccaaggtggacgacagcttcttccacagactggaagagtccttcctggtggaagaggataagaagcacgagcggcaccccatcttcggcaacattgtggatgaggtggcctaccacgagaagtaccccaccatctaccacctgagaaagaaactggtggacagcaccgacaaggccgacctgagactgatctatctggccctggctcacatgatcaagttccggggccacttcctgatcgagggcgacctgaatcctgacaacagcgacgtggacaagctgttcatccagctggtgcagacctacaaccagctgttcgaggaaaaccccatcaacgccagcggagtggatgccaaagccatcctgtctgccagactgagcaagagcagacggctggaaaacctgattgcccagctgcctggcgagaagaagaacggcctgtttggcaacctgatcgccctgtctctgggcctgacacctaacttcaagagcaacttcgacctggccgaggacgccaaactgcagctgagcaaggacacctacgacgacgacctggataacctgctggcccagatcggcgatcagtacgctgatctgttcctggccgccaagaacctgtctgatgccatcctgctgagcgacatcctgagagtgaacaccgagatcacaaaggcccctctgagcgcctctatgatcaagagatacgacgagcaccaccaggatctgaccctgctgaaagccctcgttagacagcagctgccagagaagtacaaagagattttcttcgaccagagcaagaacggctacgccggctatattgatggcggagccagccaagaagagttctacaagttcatcaagcccatcctcgagaagatggacggcaccgaggaactgctggtcaagctgaacagagaggacctgctgcggaagcagagaaccttcgacaatggcagcatccctcaccagatccacctgggagaactgcacgccattctgcggagacaagaggacttctacccattcctgaaggacaaccgggaaaagattgagaagatcctgaccttcagaatcccctactacgtgggacccctggccagaggcaatagcagatttgcctggatgacccggaagtccgaggaaaccatcacaccctggaacttcgaggaagtggtggataagggcgccagcgctcagtccttcatcgagcggatgaccaacttcgataagaacctgcctaacgagaaggtgctgcccaagcacagcctgctgtacgagtacttcaccgtgtacaacgagctgaccaaagtgaaatacgtgaccgagggaatgagaaagcccgcctttctgagcggcgagcagaaaaaggctatcgtggatctgctgttcaagaccaaccggaaagtgaccgtgaagcagctgaaagaggactacttcaagaaaatcgagtgcttcgacagcgtggaaatcagcggcgtggaagatcggtttaatgccagcctgggcacataccacgatctgctcaagattatcaaggacaaggacttcctggacaacgaagagaacgaggacatcctggaagatatcgtgctgaccctgacactgtttgaggacagagagatgatcgaggaacggctgaaaacatacgcccacctgttcgacgacaaagtgatgaagcaactgaagcggcggagatacacaggctggggcagactgtccagaaagctgatcaacggcatccgggacaagcagtccggcaagaccatcctggactttctgaagtccgacggcttcgccaatcggaacttcatgcagctgattcacgacgacagcctcaccttcaaagaggatatccagaaggcccaggtttccggccagggcgattctctgcacgagcacattgccaatctggccggctctcctgccattaagaagggcatcctgcagacagtgaaggtggtggacgaactcgtgaaagtgatgggcagacacaagcccgagaacatcgtgatcgaaatggccagagagaaccagaccacacagaagggccagaaaaacagccgcgagagaatgaagcggatcgaagagggcatcaaagagctgggcagccagatcctgaaagaacaccccgtggaaaacacccagctgcagaacgagaagctgtacctgtactacctgcagaatggacgggatatgtacgtggaccaagagctggacatcaaccggctgtccgactacgatgtggaccatatcgtgccccagtcttttctgaaggacgactccatcgacaacaaggtcctgaccagaagcgacaagaaccggggcaagagcgataacgtgccaagcgaagaggtcgtgaagaagatgaagaactactggcgacagctgctgaacgccaagctgattacccagcggaagttcgacaacctgaccaaggcagagagaggcggcctgtctgaactggataaggccggcttcatcaagagacagctggtggaaacccggcagatcaccaagcacgtggcacagattctggactcccggatgaacactaagtacgacgagaacgacaaactgatccgggaagtgaaagtcatcaccctgaagtccaagctggtgtccgatttccggaaggatttccagttttacaaagtgcgcgagatcaacaactaccatcacgcccacgacgcctacctgaatgccgttgtgggaacagccctgatcaagaagtatcccaagctggaaagcgagttcgtgtacggcgactacaaggtgtacgacgtgcggaagatgatcgccaagagcgaacaagagatcggcaaggccaccgccaagtactttttctacagcaacatcatgaactttttcaagaccgagattaccctggccaacggcgagatcagaaagcggcctctgatcgagacaaacggcgaaaccggcgagattgtgtgggacaagggcagagatttcgccaccgtgcggaaagtgctgagcatgccccaagtgaatatcgtgaaaaagaccgaggtgcagacaggcggcttctccaaagagagcatcctgcctaagcggaacagcgacaagctgatcgccagaaagaaggactgggaccctaagaagtacggcggcttcgatagccctacagtggcctattctgtgctggtggtggccaaagtggaaaagggcaagtccaagaagctcaagagcgtcaaagaactgctcggcatcaccatcatggaacggtccagcttcgagaagaatcccatcgactttctggaagccaagggctacaaagaagtcaagaaggacctgatcatcaagctccccaagtactccctgttcgagctggaaaatggccggaagagaatgctggcctctgccggcgaactgcagaaaggcaatgaactggccctgcctagcaaatacgtcaacttcctgtacctggccagccactatgagaagctgaagggcagccccgaggacaatgagcagaaacaactgttcgtggaacagcacaaacactacctggacgagatcatcgagcagatctccgagttcagcaagagagtgatcctggccgacgccaacctggacaaagtgctgtctgcctacaacaagcaccgggataagcccatcagagagcaggccgagaatatcatccacctcttcaccctgaccaacctgggagcccctgccgcctttaagtacttcgacaccaccatcgaccggaagcggtacacctctaccaaagaggtgctggacgccacactgatccaccagagcatcaccggcctgtacgagacaagaatcgatctgtcccagctcggcggcgacaaaagacctgccgcaacaaagaaagccggacaggccaagaaaaagaagtgataatagcggccgcggcccgatccagtgggcaggccaaggcctgctgggcccccgcggacccaggtgctctgggtcacggtccctgtccccgcgcccccgcttctgtctgccccattgtggctcctcaggctctctcccctgctctcccacctctacctccacccccacggatcctcaggaaaaaaaaaaaaaaaaaaaaaaaaaaaaaaaaaaaaaaaaaaaaaaaaaaaaaaaaaaaaatgcataaaaaaaaaaaaaaaaaaaaaaaaaaaaaaaaaaaaaaaaaaaaaaaaaaaaaaaaaaaa

SEQ ID NO: 854 - RNA, 100 nt, synthetic construct
  source 1..100: mol_type = other RNA
  modified_base 1..3: mod_base = OTHER; note = 2'-O-Me modified nucleotides
  modified_base 98..100: mod_base = OTHER; note = 2'-O-Me modified nucleotides
  modified_base 1..4: mod_base = OTHER; note = Phosphorothioate linkage
  modified_base 97..100: mod_base = OTHER; note = Phosphorothioate linkage
atcagccgggagggttagcagttttagagctagaaatagcaagttaaaataaggctagtccgttatcaacttgaaaaagtggcaccgagtcggtgctttt

SEQ ID NO: 855 - RNA, 137 nt, synthetic construct
  source 1..137: mol_type = other RNA
  modified_base 1..4: mod_base = OTHER; note = Phosphorothioate linkage
  modified_base 134..137: mod_base = OTHER; note = Phosphorothioate linkage
  modified_base 135..137: mod_base = OTHER; note = 2'-O-Me modified nucleotides
  modified_base 1..3: mod_base = OTHER; note = 2'-O-Me modified nucleotides
tcagccgggagggttagcatgtttgagagtaatgtaatgaaaattacgttacgcgttcaaataaaggtaaacccaaatcgttggcttgaccaactgcacagtgtgtgcgttcaggactgcttcagtgcagtcctttt

SEQ ID NO: 856 - RNA, 104 nt, synthetic construct
  source 1..104: mol_type = other RNA
  modified_base 1..3: mod_base = OTHER; note = 2'-O-Me modified nucleotides
  modified_base 102..104: mod_base = OTHER; note = 2'-O-Me modified nucleotides
  modified_base 1..4: mod_base = OTHER; note = Phosphorothioate linkage
  modified_base 101..104: mod_base = OTHER; note = Phosphorothioate linkage
tcactgcaaggcactctctagtttgagaaccttgtgaaaacaaggtgagttcaaataaggatttatccgaaatcgccgaaatggcccacattgtgtggataaat

SEQ ID NO: 857 - RNA, 104 nt, synthetic construct
  source 1..104: mol_type = other RNA
  modified_base 1..3: mod_base = OTHER; note = 2'-O-Me modified nucleotides
  modified_base 102..104: mod_base = OTHER; note = 2'-O-Me modified nucleotides
  modified_base 1..4: mod_base = OTHER; note = Phosphorothioate linkage
  modified_base 101..104: mod_base = OTHER; note = Phosphorothioate linkage
agggtctgtaaggagtactggtttgagaaccttgtgaaaacaaggtgagttcaaataaggatttatccgaaatcgccgaaatggcccacattgtgtggataaat

SEQ ID NO: 858-860 - skipped (3 entries)

SEQ ID NO: 861 - DNA, 4785 bp, synthetic construct
  source 1..4785: mol_type = other DNA
atggccatgaaacggacagccgacggaagcgagttcgagtcaccaaagaagaagcggaaagtctctgaggtggagttttcccacgagtactggatgagacatgccctgaccctggccaagagggcacgggatgagagggaggtgcctgtgggagccgtgctggtgctgaacaatagagtgatcggcgagggctggaacagagccatcggcctgcacgacccaacagcccatgccgaaattatggccctgagacagggcggcctggtcatgcagaactacagactgattgacgccaccctgtacgtgacattcgagccttgcgtgatgtgcgccggcgccatgatccactctaggatcggccgcgtggtgtttggctggaggaactcaaaaagaggcgccgcaggctccctgatgaacgtgctgaactaccccggcatgaatcaccgcgtcgaaattaccgagggaatcctggcagatgaatgtgccgccctgctgtgcgatttctatcggatgcctagacaggtgttcaatgctcagaagaaggcccagagctccatcaactctggaggatctagcggaggctcctctggcagcgagacaccaggaacaagcgagtcagcaacaccagagagcagtggcggcagcagcggcggcagcatggggcagaaggacttctacctcgggctggccatcgggacggacagcgtggggtacgccgtgacggacgagcagtacaacctgctcaagttctccggcgacgccgcctggggcgtccacctcttcgacgaggcggagctgtcccaggagcggcgggccttccgggtggcccgccgccggctcgaccggcggaagcagcgggtcatgctgctccaggagctcttcgccccggccatccgggccgtggacgccgacttctacaagcggctccaggcctcggacctcttccgggacgaggccggggaccgcttcccgatcttcaacgacgtggactacacggaccgggactactacaaggcgtaccccacgatccaccacctcatctgcgacctcatggcggacgagacggcccacgatgtccggctcgtgtacctggcctgcgcctggctggtgtccaaccgggggcacttcctgtccaacctggacaaggagaacatctcggccctgaagaacttcgacaaggtgtactccgagttcgagcacttcttcaccgacaacgggtacgcctacccgtgggccgaggccgaccggcgcacgatcggcgagatcctcaagaagaagaccacggtgacggccaagaacaaggagctgacgctcgccttcaccgggggcgggatggcccccaaggaggcgagcgaggacttcccgttcggccagcgggccatcatcaagctgctggccggcgggacggcccagctcaaggagctcttcgaccaggaggcctacgccgagttcggcgcggtctccctcaacttcgacgacgacaagttggaggagatcgcgggcaacctgggcgacgacttcgccctcatcaccgccctgcggcaggtcttcgactggtcggtgctggtcgaggccatcggggacgccgccagcatcagcgaggccaaggtggagacctaccgccagcacaaggcggacctggccatcctgaagcggatcatcaagaactaccgccccgagaagtacgacgaggtcttccgggagatcgggaaggccaactacgcggcctacgcgtaccactccaacaagaaggccgacgccaagttcaagaaggtggaccgcgaggccttctcgaagttcatcacgggcatcgtgaaggacatcacgcccaaggcggaggacgaggagatcctcgccgacatgcggaaccgcctcgacctccgcaccttcctgcccaagcagaagaacaccgacaaccgggtgatcccccaccagctctaccagtacgagctgcacgagatcctcaagaacgcggaggggtacctcccgttcttgacggagaaggacgagtccgggctgtcggtgtccgacaagatccggagcatcttcgcgttcaagatcccctacttcgtggggcccctgaacgagaagagcgaccacgcgtggatcgtccgcaaggcggggaagatctacccgtggaacttcgaggacatcgtcgacctggacgcgtccgaggaggggttcatccggcggatgacgaaccagtgcacctacctgccgggcgagcccgtcctcccgaaggacagcctcctgtaccacaagttcaccgtgctgaacgagatcaacaacctctcgatccacggtgagcggatctcggtggagctgaagcagcagatctactcggatctgttcctgaacaagaagaaggtcacccggaagcggctccgggagtacctgatcgtgaacggggtcgtcgagaaggacgacaccgacgcgatcacggggatcgacgaggagatcaagtccaacctgctgccccagatctcgttccggcggctgctggacgagggcacgctgtcggaggaggacgtcgagaagatcatcgagcgctcgacgttctccgacgacaagacgcgcctgaagaagtggctggcgcgggagtacccgcagctcaacagcaaggacgtggactacatccggtccttgcggctgcgggacttcgggcgcctgtcgcaggccttcctggagggcatcatcgcggccgaccggagcaccggggaggccttcaccatcatcagcgcgctctggaacacccagaagaacctgatggagctgctctcggaccagttcaccttcgccgagacgatcgagcgcttccgggaggactactaccgggagcacccggtgagcctctcggagcgcatggacgagatgtacttgtccaactcggtgaagcggagcgtcttccggacgctcgacatcgtgaaggatgtcaagaaggccttcggggccccgaagaagatcttcgtggaggtcacccggggcgggtcgcccgaccagaagggcaagcggaccaagtcccggagccagcagctgcgggagctgtacgacaagtgccgggacgaggacctcccgctgctgaagcagcagctggaggccatgggggacgcggcggacagcaagctgcagtccgagaagctgttcctctactacctccagctggggaagtccgcgtactccgacaagcggatcccgctggaggccctggcctccaaggcctacgacatcgaccacatctacccgcaggccttcgtgaaggacgactccatcatcaacaacaaggtcctcgtcctgagcgaggagaacggggcgaagagcaacaactaccccatccaggggtccatccggcaccacatgcagggcttctggagctacctccaggaggtgggcctgatgtccaaggagaagtacaagcgcctcacccggagcaccccgttcacggaggaggagcggtacggcttcatcaaccgccagctgacgagcacgtcgcagtcgacgaaggcggtggccacgctcctcaaggagcacctgcccgagaccgagatcgtctactgcaaggcgcggctcgtcacggacttccggcaggccttcgacctgttcaagtcgcggcagtacaacgacctgcaccacgcggtcgacgcctacctgaacatcgtgacgggcaacgtgtacaacatgcggttcaccaagaacttcaacgtgcactcgcagtactcgatcaagaccgagacggtcttcacgcggcccgtgacgtacaagtcccagaccatctgggacggcatcgacatgctggccaaggtgaagtccatcgccaacaagaacaccgcccacatcacgaagtacgcgttcatgaagaagggcgggttcttcgaccagctgcccgtccgggcggcggacgggctcatcccccggaagaagcacctgcccacgcagaagtacggcgggtacaacaagccgggggtgatgttcttcatccccgtgaagtaccagctggggaagaagagcgagctgttcatcctccccgtggagctgctctgcgggaagcggttcctggcggacccggagttcgcccaggcctacgccgtgaagcggctcgagcggatcctcaagaagccggtcgaccagatcagcttcccgctcggcatgcggccctggaaggtcaacaccgtcctggccctggacggcttcaagtactgcatcacggggtcgtccaacgggggcacccggctgatcctccagccgatgatgtccttcagctccgcgccctactgggcgttctacctgaagaagctggaggtgttcgtggagaagaacgcgaacaacccccagcacgtctacgacgaggcgtacgacaaggtcaactgcgaggacaacctcaagctgtacgacctgtactgccagaagctgacgagcacgatctacagcaagcggatcaacagcccgctggacatcctgctccaggggcgggagaagttcagcgggctggacatcaagcagcaggcccaggccctgctgaacatccaccaggtgttcggcaggatcgccgggggctgcgacttgacgctcgtcggcggcaagaaggggtcggcggcgaccagcgcctcgtcggcgatctccaacctggggaagcggtaccaggacgtgcgggtctgggacaccagcccgtcggggctctggtccaagcggagccccaacctcctggacctgctcaagagacccgccgccaccaagaaggccggccaggccaagaagaagaaggactacaaggacgacgacgacaagtga

SEQ ID NO: 862 - DNA, 4799 bp, synthetic construct
  source 1..4799: mol_type = other DNA
atggccatgaaacggacagccgacggaagcgagttcgagtcaccaaagaagaagcggaaagtctctgaggtggagttttcccacgagtactggatgagacatgccctgaccctggccaagagggcacgggatgagagggaggtgcctgtgggagccgtgctggtgctgaacaatagagtgatcggcgagggctggaacagagccatcggcctgcacgacccaacagcccatgccgaaattatggccctgagacagggcggcctggtcatgcagaactacagactgattgacgccaccctgtacgtgacattcgagccttgcgtgatgtgcgccggcgccatgatccactctaggatcggccgcgtggtgtttggctggaggaactcaaaaagaggcgccgcaggctccctgatgaacgtgctgaactaccccggcatgaatcaccgcgtcgaaattaccgagggaatcctggcagatgaatgtgccgccctgctgtgcgatttctatcggatgcctagacaggtgttcaatgctcagaagaaggcccagagctccatcaactctggaggatctagcggaggctcctctggcagcgagacaccaggaacaagcgagtcagcaacaccagagagcagtggcggcagcagcggcggcagcatgaagcagaagtactacctcgggctggccatggggacgtccagcctggggtgggccgtgaccaacgagaagtactcgctgctccggaagaaggggaaggacctctggggcgtgcggctcttcgaggaggcgaagacggccgccgaccggcggtcctaccggaccgcccggcggcggctgcagcgggagaaggcccgcatcgggtacctccgggagctcttctcggaggagatcaacaagatcgacgcgggcttcttccagcggctggaggactccaagtaccacaaggaggacaagcgggagcaccagcccttcgccctcttcgccgacaagggctacacggaccgcgagtacttcgaggactaccccacgatcttccacctgcggaaggcgctgctggacatcgagaacgaggggaagaccttcgatgtccggctggtctacctggccatcctgaacatgttcaagcaccgggggcacttcctcaacgccaacctggacgacaagtccgggggcgacctcaaggagaagatccacatcctgacgtccatggcgaacaagctgttcgacgacatcagcttcaagaccgtggacatcaaggacatcgagcagatcctggccagcaaggactactcgaactcgacgcggctcgagaagctgctcgagctgttcgagctgtcgaagaccaagaacaaggtcgagacggagatcttcaagatgatctgcggcctgaaggggaccatctcgaagatcttcgcgaacgagagcatggacgaggaggcccagaagctctcgttctcgttccgggacgggaactacgacgagaagatcgtcgagatggaggaggcgctctcggaggagtcctacgagttcatcatgatcatgaagcaggtccacgactgggccgtgctcagcaacatcatgatgggcgaggagtacctctcggtggcgcgggtcaaggcctacgagaagcacaagaaggacctgaacatgctcaaggccctgctcaagaactactccatcaaggagtacaactccatgttccggatcatgaaggacaacaactactcgtcctacatcgggagcgtgatctcccaggagacgatccggcgcaaggggaagtacacgacggacgacttctacaagaacgtgaagtcgatcgtcctcaagtgcgaggagtgcaccgagaaggagtacatcctcagcgagatcgagaagaagacgttcctgcccaagcagaacacgacgtcgaactcggtcatcccgaaccaggtccacaagaaggagctgaagcggatcctcgagaacgcggccaagtacctcgagttcctgaacgacaaggacgacacggggctcaccgtgtcggagaagatcgtgcggctcttcgagttccagatcccgtactacgtggggccgctgagcaacggcgtctgcgacgggaagaacgtctggtccgtccggcgcgagaagggcgccgtgctgccgtggaacttcgaggagaagatcgacgtgaagcagagcagcgagaacttcatcaccaagctggtgaaccactgcacctacctcaacggggagaccgtcctccccaagaactcgctgctctacgagaagttcatggtcctgaacgagctgaacaacctgaagatcaacggggtgaagatcggggtggagctcaagcagagcatctacaacgacgtcttcaagaaggggaagaaggtcacggccaaggccctgatccagtacctgaagaacatcggggagatcgacgccaccgaggagacggtggtgtcggggatcgacggggacttcacgaaccggctcgcgaactacaagaagttcatcgagatcttcaaggtccccacgctcacctacgagcaggagcagatcgccgaggacatcatcttctactccaccgtgtacggggagtcgaagaagttcctcgaggagcggatcagggagaagtacaacgaggagctgtcggagaaccagatcaagcggatcctcggcctcaagttcaaggactggggccggctctcgaaggagctgctgctgctgcaggggatcgacaagcagaccggcgagatctccagcatcatcagcaagatgtggtcggacaactacaacctgatggagctgatcgccaccgacaagttctcgtacgggtacaacatcgagcagaagacctcgaagatcgagaaggtcctgtccgacatcgagtacagcgacctcgacgagatctacatctcggccccggtcaagcggatggtctggcagaccatcctcgtgctgaaggagctcgagaaggtcatgggctgcgagcccgagaagatcttcgtcgagatggcgcgggacgccaacgcgccgaagaagcggacggagtcccgcaagaagaagttcctcgagctctacaagacctgcaagaaggagtcccgggactggaaggaggagctcgaggacaccgaggagagcaagttccggtccaagaagctgtacctgtactacacccagaaggggcggtgcatgtacagcggggaggagatcgagctgaaggatctcttcaacgacaacctgtacgacatcgaccacatctacccgcggcacttcgtgaaggacgacagcatcgagaacaacctcgtgctggtccggaaggtggacaacgcccacaagtcggacgccgtgctggagtcgtcgatccgcaacaagatgtgcggcttctggaagatcctccgggaggggagcttcatcaccgacgagaagtacaagcgcctcatgcggaccgacgacttcagcgacgaggagcgggccggcttcatcagccggcagatcgtggagacgcggcaggggaccaaggtcatcgccgacctcttcacgaagacgttccccgagagcgagatcatctacgtgaaggcggggaacgtctcggacttccggaagaagttcgacttcctgaagtgccgcatcgtgaacgacttccaccacgcgcaggacgcgtacctgaacatcgtggtggggaacgtgtacaacacgaagttcacgcagaacccgatgaacttcatccgggagtacaacaaggaccccaaggccaacaagtaccacatggacaagctcttcgagtacccggtgtcccggaacggccgggacgcctgggtgacgaagaacgcggagtccatctgcatggtcaagaagatgatggagaagaacacgccgctcatcacgcggatgaactacgagagccacggcgggatcgccgaccagacgatctactccgccgaggacgcccagaaggccaagggcaaggggtacatcagcatcaagtcctccgacggcaacctcctcgacacctgcaagtacggcgggatgaagaagtacaccggcacgtacttcctcctgctggagcacaccaagaaggagaagcggatccggaccatcgaggccatgccgctctacctgaaggacaagctcaacacgcgggagaagatcgagaagtacttcgagcagtccgtggacttcgcctacgagcagccgaaggtgatcctggacaagatcaagatgtactccctgatcaaggtggacgggttctacctctacctgacggggcggacggggaaccagctctccgtctgcaacgcggtgcagatgagcctgtccgccgggatggtgaagtacgtccggaagatctcgatcgccaacgagcggtacgccgccgacaaggagttcgagaaggacgagaacatctccgtccagaagaacctcgagctctacgagatcctgaaggagaagcacctcaaccagatctacggcaagcggccgaaccccgtcggcgagaagatcgagaaggggatcgagaagttccggagcctcagcgtccggaagcagatctacgtgctgctgcagatcctgcagctgtcccagctgagcaaccagggggccgacctcctggagatcggcggggagaagaagaccgggacgtcgaagctcaacaagaacatcacggagaagcaggagttcaagctcatcaaccagtccgtgacggggctctacgagaacgagatcgacctgctccggatcaagagacccgccgccaccaagaaggccggccaggccaagaagaagaaggactacaaggacgacgacgacaagtg

SEQ ID NO: 863 - DNA, 4995 bp, synthetic construct
  source 1..4995: mol_type = other DNA
atggccatgaaacggacagccgacggaagcgagttcgagtcaccaaagaagaagcggaaagtctctgaggtggagttttcccacgagtactggatgagacatgccctgaccctggccaagagggcacgggatgagagggaggtgcctgtgggagccgtgctggtgctgaacaatagagtgatcggcgagggctggaacagagccatcggcctgcacgacccaacagcccatgccgaaattatggccctgagacagggcggcctggtcatgcagaactacagactgattgacgccaccctgtacgtgacattcgagccttgcgtgatgtgcgccggcgccatgatccactctaggatcggccgcgtggtgtttggctggaggaactcaaaaagaggcgccgcaggctccctgatgaacgtgctgaactaccccggcatgaatcaccgcgtcgaaattaccgagggaatcctggcagatgaatgtgccgccctgctgtgcgatttctatcggatgcctagacaggtgttcaatgctcagaagaaggcccagagctccatcaactctggaggatctagcggaggctcctctggcagcgagacaccaggaacaagcgagtcagcaacaccagagagcagtggcggcagcagcggcggcagcatggacaagaagccgccctactacatcgggctggcctgcggcaccaactccgtggggtgggccgtgtccgacaagaactaccacctgctgaaggggacccaccacatcaagaccgagaaggggaccaagaccaagaagcagaccctgtggggcttccggctgttcgaggaggccgagaccgccgccgagcggcggatccaccggtccgcccggcggcgggccgagcgcgccaagaaccgcctgaagctcctgcggatgctgtttcacgacgagatcgtgcaggtggaccccgagttctaccagcggctgaaggagtccttctacctgctggacgacaagaagctgcagaagaacagcaagaacacgctgttcaacgacagcaacctgaccgacaaggacttccacaagaagtaccccaccatctggcacctgcggcaggccatcatcaacgccaaggatgacgaggccttcgacatccggctgtacttcctggccatccagcacatcctgaagcaccggggccacttcctgatggagggggagatcaactccgacggggacgtggacttcgagtccatcttcgagaacttccggtgcgaggccgagcgggtcggctacaacatcgccgacgtgccggccgaggtgaaggagctgctgatgcagaagatgtccaagacggacaagaagaagtccctcaaggacatcctgtacatcgagggggacgagctcgacgacgacgtccccaagggccagctggagctggccgggctgctggtcggctccaaggtggacctgaagaagatcttctccatcaacgacgacgagaagttcccctactccttcagcgagggcgccttcgaggacaagctgcccgacatcgagatgaccgtgggcagcgagaacctcgacctgatcttcgccgccaagaagatctacgactacgtgaccctggacaacctgctggccggcaacaagctgatcagcgacgccatggtggccaactacaaccagcacagcaacgacctgaagaagctgaagcaggtgttccggccccaccgggaggtctacgacaagctgttcaagaccaagctgtacaacgagaagttccccagctacgacgcctacatcagcaaggcctacaccgaggacaagtccgggcggaagtcctcgaagaacatcgggcaggaggacttcaacaagcacctgcacaagctgctggaggagatcaagaccaagaccaagcccgagctggactccctggtggacgagctgctggaccggaccgacaccagcgagaagtccgtgtccccgctgctgctgcccaagcagcgggggcaggccaagggcaccatcccccagcagctgcacggcaaggagctgaagtacatcctgcagaagctgcagaaggactacccgtccttcgccgaggtgacccccggcgaggacgagtcctgcaacaccaaggccaagaagatcatcaagatccacgagttccggatcccctactactgcggccccatcgtgaagcggaagttcgacgatgacgggaagcaggtggccaacggcaagagccagttctcctgggccgacgaggagatcgccgagctggtgtacccctggaacttcgacaagctgatcaagaaggagcagcgggccaacaacttcatccgccggatgaccaacgagtgcacccacctggtgggcgaggacgtgctgcccaagtgctccctgatctaccagaagtacatgatcctgaacgagctgaacaacctgaagatcaacggctaccggatcgacaaccagctcaagcagcagatcttcgagcgggggtacaagaacaacgagatcaagggcaacatcaccctgaagaagctggagaagtggtgcaaggacaacgccctgatctccatcaacgacgagatgagcggcaccagcgaggtgaagaccctgcccaagtaccagacctaccaggacttctcccggatcctgggcaccgacttcgcccacaagtacagcgccaacaagctggagaaggtggtggagtccatcaccgtcctgggggacgagaagtccatgctgaagcagtccatccaggagatcctgaactgcgacgccaagacggccaactccctgtccaagctgagctacaaggactgggggcggatgtccgccaagttcctgaacgggatcaccgtgaacgaccggaccatcctggactacctgtgggaggacaacaagaacctgatggagctgctggggcaggaggtgggcttcggcaagatcgtggaggagtacaacaagtccaagcggcccgtcaccaaccggatcacctaccacgacgtggagtccctgtactgcagcccagccgtgaagcggtccgtgtggcagaccatccggatcgtggacgagctggtgaagaacctgcagtacgcccccgagaagatcttcctggaggtgacccggggcgaggacaagaacgccaagggcaagtacaccctggcccggcggaaggacctggagaccaagctgaaggccgtgaagaccgacgacgcccgggccatcctgaaggagctggacggctacgaggaccgggacctccagagcaagaagctgttcctgtacttcagccagatggggaagtgcgcctactccggcgagcccatcagcctggaggagctgaacaacagccagctgtacgacatcgaccacatctacccccggtccaagaccaaggacgacagcatcacccggaacctggtgctggtgaaggccaacctgaaccgggagaagaccaacaactaccccatcagcgacaccatccggaacaagatgcacggcatctggtccgtgtggtaccaccagggcctgatcaccaaggagaagtacgagcggctgacccgggccaccccgctgaccaacgacgagctgggcagcttcatcgcccggcagctggtggagaccagccagtccgtgaaggccatccgggacctgctgaagcaggcctaccccaagaccaagatcgtgatggtgaaggccggccaggtgtccaacttccggcacctgatgtcccgggacaagaaggaccgggacggcaacatctacgagcccggcaagcccgagttcatcaaggtgcgggagatcaacgacctgcaccacgccaaggacgcctacctgaacatcgtggtgggcaacgtgatgaacgagaccttcacggacaaccccaacgagtggatcaagcggcgggccgggaaggagtactccatcaaccccgagcgcatcttccgggccagcaagacctaccggaaggccaacggggaggagacctcctaccccgaggtcaacggctggaacttcgccgagtccatccaggccgtgtccaacacgatgcggcggaacgacgtgatctggacccggatgaactacatcgagagcggggagatcagcgacctgcagctggtggggaagtccaacaaggccgacggcctgctgcggatcaagcagcaggagcggctggaccccaagaagtacggcggctacaactccctgaagggcgcccacttcgccctgatcgagtgcaaggacaagaaggggaacctgcagcggtgcatcgtgcagatccccatcatcgccaagaacaacatcgagaactacatcgccgagaactacaccgacgcccaggtgatcctgcccatcatcaagtacaagtccctgctgaaggccgacggcctgctgctgaccatcagcaacaaggactccgacctgaagaacgggtaccagcacgccgtgcaggccaagttccagcagagcatcagcccctacctgaagaccatctgctccatctgcgccaaggacaagctggcgcggaacaactaccagatctccaccgaggacaacgtgaacgtggagcacaacctccagctgttcgacgagttctgcgacaagatgaagatctacagcgggtaccccgagctggccggcggcatcgagaagatcatgctgtcccggaccaccttcagcgagctggacctgaagcagcagtgcctgaccctgggccagatgatgttcatcttcgcctgcaaggcccagaacgccaagctgaacaccatcggctgcggcgacagcgtggggcggatccggatcagcaacaacaagctgttctcctacaacaacctgcacctgatcaaccagagccccaccgggctgtacgaggaggtgatcgacctgaagaccgtgcggcccaaggtgaacaagcaggaccgggagaagagacccgccgccaccaagaaggccggccaggccaagaagaagaaggactacaaggacgacgacgacaagtga

SEQ ID NO: 864 - protein, 1594 aa, synthetic construct
MAMKRTADGSEFESPKKKRKVSEVEFSHEYWMRHALTLAKRARDEREVPVGAVLVLNNRVIGEGWNRAIGLHDPTAHAEIMALRQGGLVMQNYRLIDATLYVTFEPCVMCAGAMIHSRIGRVVFGWRNSKRGAAGSLMNVLNYPGMNHRVEITEGILADECAALLCDFYRMPRQVFNAQKKAQSSINSGGSSGGSSGSETPGTSESATPESSGGSSGGSMGQKDFYLGLAIGTDSVGYAVTDEQYNLLKFSGDAAWGVHLFDEAELSQERRAFRVARRRLDRRKQRVMLLQELFAPAIRAVDADFYKRLQASDLFRDEAGDRFPIFNDVDYTDRDYYKAYPTIHHLICDLMADETAHDVRLVYLACAWLVSNRGHFLSNLDKENISALKNFDKVYSEFEHFFTDNGYAYPWAEADRRTIGEILKKKTTVTAKNKELTLAFTGGGMAPKEASEDFPFGQRAIIKLLAGGTAQLKELFDQEAYAEFGAVSLNFDDDKLEEIAGNLGDDFALITALRQVFDWSVLVEAIGDAASISEAKVETYRQHKADLAILKRIIKNYRPEKYDEVFREIGKANYAAYAYHSNKKADAKFKKVDREAFSKFITGIVKDITPKAEDEEILADMRNRLDLRTFLPKQKNTDNRVIPHQLYQYELHEILKNAEGYLPFLTEKDESGLSVSDKIRSIFAFKIPYFVGPLNEKSDHAWIVRKAGKIYPWNFEDIVDLDASEEGFIRRMTNQCTYLPGEPVLPKDSLLYHKFTVLNEINNLSIHGERISVELKQQIYSDLFLNKKKVTRKRLREYLIVNGVVEKDDTDAITGIDEEIKSNLLPQISFRRLLDEGTLSEEDVEKIIERSTFSDDKTRLKKWLAREYPQLNSKDVDYIRSLRLRDFGRLSQAFLEGIIAADRSTGEAFTIISALWNTQKNLMELLSDQFTFAETIERFREDYYREHPVSLSERMDEMYLSNSVKRSVFRTLDIVKDVKKAFGAPKKIFVEVTRGGSPDQKGKRTKSRSQQLRELYDKCRDEDLPLLKQQLEAMGDAADSKLQSEKLFLYYLQLGKSAYSDKRIPLEALASKAYDIDHIYPQAFVKDDSIINNKVLVLSEENGAKSNNYPIQGSIRHHMQGFWSYLQEVGLMSKEKYKRLTRSTPFTEEERYGFINRQLTSTSQSTKAVATLLKEHLPETEIVYCKARLVTDFRQAFDLFKSRQYNDLHHAVDAYLNIVTGNVYNMRFTKNFNVHSQYSIKTETVFTRPVTYKSQTIWDGIDMLAKVKSIANKNTAHITKYAFMKKGGFFDQLPVRAADGLIPRKKHLPTQKYGGYNKPGVMFFIPVKYQLGKKSELFILPVELLCGKRFLADPEFAQAYAVKRLERILKKPVDQISFPLGMRPWKVNTVLALDGFKYCITGSSNGGTRLILQPMMSFSSAPYWAFYLKKLEVFVEKNANNPQHVYDEAYDKVNCEDNLKLYDLYCQKLTSTIYSKRINSPLDILLQGREKFSGLDIKQQAQALLNIHQVFGRIAGGCDLTLVGGKKGSAATSASSAISNLGKRYQDVRVWDTSPSGLWSKRSPNLLDLLKRPAATKKAGQAKKKKDYKDDDDK

SEQ ID NO: 865 - protein, 1599 aa, synthetic construct
MAMKRTADGSEFESPKKKRKVSEVEFSHEYWMRHALTLAKRARDEREVPVGAVLVLNNRVIGEGWNRAIGLHDPTAHAEIMALRQGGLVMQNYRLIDATLYVTFEPCVMCAGAMIHSRIGRVVFGWRNSKRGAAGSLMNVLNYPGMNHRVEITEGILADECAALLCDFYRMPRQVFNAQKKAQSSINSGGSSGGSSGSETPGTSESATPESSGGSSGGSMKQKYYLGLAMGTSSLGWAVTNEKYSLLRKKGKDLWGVRLFEEAKTAADRRSYRTARRRLQREKARIGYLRELFSEEINKIDAGFFQRLEDSKYHKEDKREHQPFALFADKGYTDREYFEDYPTIFHLRKALLDIENEGKTFDVRLVYLAILNMFKHRGHFLNANLDDKSGGDLKEKIHILTSMANKLFDDISFKTVDIKDIEQILASKDYSNSTRLEKLLELFELSKTKNKVETEIFKMICGLKGTISKIFANESMDEEAQKLSFSFRDGNYDEKIVEMEEALSEESYEFIMIMKQVHDWAVLSNIMMGEEYLSVARVKAYEKHKKDLNMLKALLKNYSIKEYNSMFRIMKDNNYSSYIGSVISQETIRRKGKYTTDDFYKNVKSIVLKCEECTEKEYILSEIEKKTFLPKQNTTSNSVIPNQVHKKELKRILENAAKYLEFLNDKDDTGLTVSEKIVRLFEFQIPYYVGPLSNGVCDGKNVWSVRREKGAVLPWNFEEKIDVKQSSENFITKLVNHCTYLNGETVLPKNSLLYEKFMVLNELNNLKINGVKIGVELKQSIYNDVFKKGKKVTAKALIQYLKNIGEIDATEETVVSGIDGDFTNRLANYKKFIEIFKVPTLTYEQEQIAEDIIFYSTVYGESKKFLEERIREKYNEELSENQIKRILGLKFKDWGRLSKELLLLQGIDKQTGEISSIISKMWSDNYNLMELIATDKFSYGYNIEQKTSKIEKVLSDIEYSDLDEIYISAPVKRMVWQTILVLKELEKVMGCEPEKIFVEMARDANAPKKRTESRKKKFLELYKTCKKESRDWKEELEDTEESKFRSKKLYLYYTQKGRCMYSGEEIELKDLFNDNLYDIDHIYPRHFVKDDSIENNLVLVRKVDNAHKSDAVLESSIRNKMCGFWKILREGSFITDEKYKRLMRTDDFSDEERAGFISRQIVETRQGTKVIADLFTKTFPESEIIYVKAGNVSDFRKKFDFLKCRIVNDFHHAQDAYLNIVVGNVYNTKFTQNPMNFIREYNKDPKANKYHMDKLFEYPVSRNGRDAWVTKNAESICMVKKMMEKNTPLITRMNYESHGGIADQTIYSAEDAQKAKGKGYISIKSSDGNLLDTCKYGGMKKYTGTYFLLLEHTKKEKRIRTIEAMPLYLKDKLNTREKIEKYFEQSVDFAYEQPKVILDKIKMYSLIKVDGFYLYLTGRTGNQLSVCNAVQMSLSAGMVKYVRKISIANERYAADKEFEKDENISVQKNLELYEILKEKHLNQIYGKRPNPVGEKIEKGIEKFRSLSVRKQIYVLLQILQLSQLSNQGADLLEIGGEKKTGTSKLNKNITEKQEFKLINQSVTGLYENEIDLLRIKRPAATKKAGQAKKKKDYKDDDDK

SEQ ID NO: 866 - protein, 1664 aa, synthetic construct
MAMKRTADGSEFESPKKKRKVSEVEFSHEYWMRHALTLAKRARDEREVPVGAVLVLNNRVIGEGWNRAIGLHDPTAHAEIMALRQGGLVMQNYRLIDATLYVTFEPCVMCAGAMIHSRIGRVVFGWRNSKRGAAGSLMNVLNYPGMNHRVEITEGILADECAALLCDFYRMPRQVFNAQKKAQSSINSGGSSGGSSGSETPGTSESATPESSGGSSGGSMDKKPPYYIGLACGTNSVGWAVSDKNYHLLKGTHHIKTEKGTKTKKQTLWGFRLFEEAETAAERRIHRSARRRAERAKNRLKLLRMLFHDEIVQVDPEFYQRLKESFYLLDDKKLQKNSKNTLFNDSNLTDKDFHKKYPTIWHLRQAIINAKDDEAFDIRLYFLAIQHILKHRGHFLMEGEINSDGDVDFESIFENFRCEAERVGYNIADVPAEVKELLMQKMSKTDKKKSLKDILYIEGDELDDDVPKGQLELAGLLVGSKVDLKKIFSINDDEKFPYSFSEGAFEDKLPDIEMTVGSENLDLIFAAKKIYDYVTLDNLLAGNKLISDAMVANYNQHSNDLKKLKQVFRPHREVYDKLFKTKLYNEKFPSYDAYISKAYTEDKSGRKSSKNIGQEDFNKHLHKLLEEIKTKTKPELDSLVDELLDRTDTSEKSVSPLLLPKQRGQAKGTIPQQLHGKELKYILQKLQKDYPSFAEVTPGEDESCNTKAKKIIKIHEFRIPYYCGPIVKRKFDDDGKQVANGKSQFSWADEEIAELVYPWNFDKLIKKEQRANNFIRRMTNECTHLVGEDVLPKCSLIYQKYMILNELNNLKINGYRIDNQLKQQIFERGYKNNEIKGNITLKKLEKWCKDNALISINDEMSGTSEVKTLPKYQTYQDFSRILGTDFAHKYSANKLEKVVESITVLGDEKSMLKQSIQEILNCDAKTANSLSKLSYKDWGRMSAKFLNGITVNDRTILDYLWEDNKNLMELLGQEVGFGKIVEEYNKSKRPVTNRITYHDVESLYCSPAVKRSVWQTIRIVDELVKNLQYAPEKIFLEVTRGEDKNAKGKYTLARRKDLETKLKAVKTDDARAILKELDGYEDRDLQSKKLFLYFSQMGKCAYSGEPISLEELNNSQLYDIDHIYPRSKTKDDSITRNLVLVKANLNREKTNNYPISDTIRNKMHGIWSVWYHQGLITKEKYERLTRATPLTNDELGSFIARQLVETSQSVKAIRDLLKQAYPKTKIVMVKAGQVSNFRHLMSRDKKDRDGNIYEPGKPEFIKVREINDLHHAKDAYLNIVVGNVMNETFTDNPNEWIKRRAGKEYSINPERIFRASKTYRKANGEETSYPEVNGWNFAESIQAVSNTMRRNDVIWTRMNYIESGEISDLQLVGKSNKADGLLRIKQQERLDPKKYGGYNSLKGAHFALIECKDKKGNLQRCIVQIPIIAKNNIENYIAENYTDAQVILPIIKYKSLLKADGLLLTISNKDSDLKNGYQHAVQAKFQQSISPYLKTICSICAKDKLARNNYQISTEDNVNVEHNLQLFDEFCDKMKIYSGYPELAGGIEKIMLSRTTFSELDLKQQCLTLGQMMFIFACKAQNAKLNTIGCGDSVGRIRISNNKLFSYNNLHLINQSPTGLYEEVIDLKTVRPKVNKQDREKRPAATKKAGQAKKKKDYKDDDDK

SEQ ID NO: 867 - protein, 166 aa, synthetic construct
SEVEFSHEYWMRHALTLAKRARDEREVPVGAVLVLNNRVIGEGWNRAIGLHDPTAHAEIMALRQGGLVMQNYRLIDATLYVTFEPCVMCAGAMIHSRIGRVVFGWRNSKRGAAGSLMNVLNYPGMNHRVEITEGILADECAALLCDFYRMPRQVFNAQKKAQSSIN

SEQ ID NO: 868 - protein, 32 aa, synthetic construct
SGGSSGGSSGSETPGTSESATPESSGGSSGGS

SEQ ID NO: 869 - protein, 1351 aa, synthetic construct
MGQKDFYLGLAIGTDSVGYAVTDEQYNLLKFSGDAAWGVHLFDEAELSQERRAFRVARRRLDRRKQRVMLLQELFAPAIRAVDADFYKRLQASDLFRDEAGDRFPIFNDVDYTDRDYYKAYPTIHHLICDLMADETAHDVRLVYLACAWLVSNRGHFLSNLDKENISALKNFDKVYSEFEHFFTDNGYAYPWAEADRRTIGEILKKKTTVTAKNKELTLAFTGGGMAPKEASEDFPFGQRAIIKLLAGGTAQLKELFDQEAYAEFGAVSLNFDDDKLEEIAGNLGDDFALITALRQVFDWSVLVEAIGDAASISEAKVETYRQHKADLAILKRIIKNYRPEKYDEVFREIGKANYAAYAYHSNKKADAKFKKVDREAFSKFITGIVKDITPKAEDEEILADMRNRLDLRTFLPKQKNTDNRVIPHQLYQYELHEILKNAEGYLPFLTEKDESGLSVSDKIRSIFAFKIPYFVGPLNEKSDHAWIVRKAGKIYPWNFEDIVDLDASEEGFIRRMTNQCTYLPGEPVLPKDSLLYHKFTVLNEINNLSIHGERISVELKQQIYSDLFLNKKKVTRKRLREYLIVNGVVEKDDTDAITGIDEEIKSNLLPQISFRRLLDEGTLSEEDVEKIIERSTFSDDKTRLKKWLAREYPQLNSKDVDYIRSLRLRDFGRLSQAFLEGIIAADRSTGEAFTIISALWNTQKNLMELLSDQFTFAETIERFREDYYREHPVSLSERMDEMYLSNSVKRSVFRTLDIVKDVKKAFGAPKKIFVEVTRGGSPDQKGKRTKSRSQQLRELYDKCRDEDLPLLKQQLEAMGDAADSKLQSEKLFLYYLQLGKSAYSDKRIPLEALASKAYDIDHIYPQAFVKDDSIINNKVLVLSEENGAKSNNYPIQGSIRHHMQGFWSYLQEVGLMSKEKYKRLTRSTPFTEEERYGFINRQLTSTSQSTKAVATLLKEHLPETEIVYCKARLVTDFRQAFDLFKSRQYNDLHHAVDAYLNIVTGNVYNMRFTKNFNVHSQYSIKTETVFTRPVTYKSQTIWDGIDMLAKVKSIANKNTAHITKYAFMKKGGFFDQLPVRAADGLIPRKKHLPTQKYGGYNKPGVMFFIPVKYQLGKKSELFILPVELLCGKRFLADPEFAQAYAVKRLERILKKPVDQISFPLGMRPWKVNTVLALDGFKYCITGSSNGGTRLILQPMMSFSSAPYWAFYLKKLEVFVEKNANNPQHVYDEAYDKVNCEDNLKLYDLYCQKLTSTIYSKRINSPLDILLQGREKFSGLDIKQQAQALLNIHQVFGRIAGGCDLTLVGGKKGSAATSASSAISNLGKRYQDVRVWDTSPSGLWSKRSPNLLDLL

SEQ ID NO: 870 - protein, 1351 aa, synthetic construct
MGQKDFYLGLDIGTDSVGYAVTDEQYNLLKFSGDAAWGVHLFDEAELSQERRAFRVARRRLDRRKQRVMLLQELFAPAIRAVDADFYKRLQASDLFRDEAGDRFPIFNDVDYTDRDYYKAYPTIHHLICDLMADETAHDVRLVYLACAWLVSNRGHFLSNLDKENISALKNFDKVYSEFEHFFTDNGYAYPWAEADRRTIGEILKKKTTVTAKNKELTLAFTGGGMAPKEASEDFPFGQRAIIKLLAGGTAQLKELFDQEAYAEFGAVSLNFDDDKLEEIAGNLGDDFALITALRQVFDWSVLVEAIGDAASISEAKVETYRQHKADLAILKRIIKNYRPEKYDEVFREIGKANYAAYAYHSNKKADAKFKKVDREAFSKFITGIVKDITPKAEDEEILADMRNRLDLRTFLPKQKNTDNRVIPHQLYQYELHEILKNAEGYLPFLTEKDESGLSVSDKIRSIFAFKIPYFVGPLNEKSDHAWIVRKAGKIYPWNFEDIVDLDASEEGFIRRMTNQCTYLPGEPVLPKDSLLYHKFTVLNEINNLSIHGERISVELKQQIYSDLFLNKKKVTRKRLREYLIVNGVVEKDDTDAITGIDEEIKSNLLPQISFRRLLDEGTLSEEDVEKIIERSTFSDDKTRLKKWLAREYPQLNSKDVDYIRSLRLRDFGRLSQAFLEGIIAADRSTGEAFTIISALWNTQKNLMELLSDQFTFAETIERFREDYYREHPVSLSERMDEMYLSNSVKRSVFRTLDIVKDVKKAFGAPKKIFVEVTRGGSPDQKGKRTKSRSQQLRELYDKCRDEDLPLLKQQLEAMGDAADSKLQSEKLFLYYLQLGKSAYSDKRIPLEALASKAYDIDVIYPQAFVKDDSIINNKVLVLSEENGAKSNNYPIQGSIRHHMQGFWSYLQEVGLMSKEKYKRLTRSTPFTEEERYGFINRQLTSTSQSTKAVATLLKEHLPETEIVYCKARLVTDFRQAFDLFKSRQYNDLHHAVDAYLNIVTGNVYNMRFTKNFNVHSQYSIKTETVFTRPVTYKSQTIWDGIDMLAKVKSIANKNTAHITKYAFMKKGGFFDQLPVRAADGLIPRKKHLPTQKYGGYNKPGVMFFIPVKYQLGKKSELFILPVELLCGKRFLADPEFAQAYAVKRLERILKKPVDQISFPLGMRPWKVNTVLALDGFKYCITGSSNGGTRLILQPMMSFSSAPYWAFYLKKLEVFVEKNANNPQHVYDEAYDKVNCEDNLKLYDLYCQKLTSTIYSKRINSPLDILLQGREKFSGLDIKQQAQALLNIHQVFGRIAGGCDLTLVGGKKGSAATSASSAISNLGKRYQDVRVWDTSPSGLWSKRSPNLLDLL

SEQ ID NO: 871 - protein, 1351 aa, synthetic construct
MGQKDFYLGLAIGTDSVGYAVTDEQYNLLKFSGDAAWGVHLFDEAELSQERRAFRVARRRLDRRKQRVMLLQELFAPAIRAVDADFYKRLQASDLFRDEAGDRFPIFNDVDYTDRDYYKAYPTIHHLICDLMADETAHDVRLVYLACAWLVSNRGHFLSNLDKENISALKNFDKVYSEFEHFFTDNGYAYPWAEADRRTIGEILKKKTTVTAKNKELTLAFTGGGMAPKEASEDFPFGQRAIIKLLAGGTAQLKELFDQEAYAEFGAVSLNFDDDKLEEIAGNLGDDFALITALRQVFDWSVLVEAIGDAASISEAKVETYRQHKADLAILKRIIKNYRPEKYDEVFREIGKANYAAYAYHSNKKADAKFKKVDREAFSKFITGIVKDITPKAEDEEILADMRNRLDLRTFLPKQKNTDNRVIPHQLYQYELHEILKNAEGYLPFLTEKDESGLSVSDKIRSIFAFKIPYFVGPLNEKSDHAWIVRKAGKIYPWNFEDIVDLDASEEGFIRRMTNQCTYLPGEPVLPKDSLLYHKFTVLNEINNLSIHGERISVELKQQIYSDLFLNKKKVTRKRLREYLIVNGVVEKDDTDAITGIDEEIKSNLLPQISFRRLLDEGTLSEEDVEKIIERSTFSDDKTRLKKWLAREYPQLNSKDVDYIRSLRLRDFGRLSQAFLEGIIAADRSTGEAFTIISALWNTQKNLMELLSDQFTFAETIERFREDYYREHPVSLSERMDEMYLSNSVKRSVFRTLDIVKDVKKAFGAPKKIFVEVTRGGSPDQKGKRTKSRSQQLRELYDKCRDEDLPLLKQQLEAMGDAADSKLQSEKLFLYYLQLGKSAYSDKRIPLEALASKAYDIDVIYPQAFVKDDSIINNKVLVLSEENGAKSNNYPIQGSIRHHMQGFWSYLQEVGLMSKEKYKRLTRSTPFTEEERYGFINRQLTSTSQSTKAVATLLKEHLPETEIVYCKARLVTDFRQAFDLFKSRQYNDLHHAVDAYLNIVTGNVYNMRFTKNFNVHSQYSIKTETVFTRPVTYKSQTIWDGIDMLAKVKSIANKNTAHITKYAFMKKGGFFDQLPVRAADGLIPRKKHLPTQKYGGYNKPGVMFFIPVKYQLGKKSELFILPVELLCGKRFLADPEFAQAYAVKRLERILKKPVDQISFPLGMRPWKVNTVLALDGFKYCITGSSNGGTRLILQPMMSFSSAPYWAFYLKKLEVFVEKNANNPQHVYDEAYDKVNCEDNLKLYDLYCQKLTSTIYSKRINSPLDILLQGREKFSGLDIKQQAQALLNIHQVFGRIAGGCDLTLVGGKKGSAATSASSAISNLGKRYQDVRVWDTSPSGLWSKRSPNLLDLL

SEQ ID NO: 872 - protein, 1356 aa, synthetic construct
MKQKYYLGLAMGTSSLGWAVTNEKYSLLRKKGKDLWGVRLFEEAKTAADRRSYRTARRRLQREKARIGYLRELFSEEINKIDAGFFQRLEDSKYHKEDKREHQPFALFADKGYTDREYFEDYPTIFHLRKALLDIENEGKTFDVRLVYLAILNMFKHRGHFLNANLDDKSGGDLKEKIHILTSMANKLFDDISFKTVDIKDIEQILASKDYSNSTRLEKLLELFELSKTKNKVETEIFKMICGLKGTISKIFANESMDEEAQKLSFSFRDGNYDEKIVEMEEALSEESYEFIMIMKQVHDWAVLSNIMMGEEYLSVARVKAYEKHKKDLNMLKALLKNYSIKEYNSMFRIMKDNNYSSYIGSVISQETIRRKGKYTTDDFYKNVKSIVLKCEECTEKEYILSEIEKKTFLPKQNTTSNSVIPNQVHKKELKRILENAAKYLEFLNDKDDTGLTVSEKIVRLFEFQIPYYVGPLSNGVCDGKNVWSVRREKGAVLPWNFEEKIDVKQSSENFITKLVNHCTYLNGETVLPKNSLLYEKFMVLNELNNLKINGVKIGVELKQSIYNDVFKKGKKVTAKALIQYLKNIGEIDATEETVVSGIDGDFTNRLANYKKFIEIFKVPTLTYEQEQIAEDIIFYSTVYGESKKFLEERIREKYNEELSENQIKRILGLKFKDWGRLSKELLLLQGIDKQTGEISSIISKMWSDNYNLMELIATDKFSYGYNIEQKTSKIEKVLSDIEYSDLDEIYISAPVKRMVWQTILVLKELEKVMGCEPEKIFVEMARDANAPKKRTESRKKKFLELYKTCKKESRDWKEELEDTEESKFRSKKLYLYYTQKGRCMYSGEEIELKDLFNDNLYDIDHIYPRHFVKDDSIENNLVLVRKVDNAHKSDAVLESSIRNKMCGFWKILREGSFITDEKYKRLMRTDDFSDEERAGFISRQIVETRQGTKVIADLFTKTFPESEIIYVKAGNVSDFRKKFDFLKCRIVNDFHHAQDAYLNIVVGNVYNTKFTQNPMNFIREYNKDPKANKYHMDKLFEYPVSRNGRDAWVTKNAESICMVKKMMEKNTPLITRMNYESHGGIADQTIYSAEDAQKAKGKGYISIKSSDGNLLDTCKYGGMKKYTGTYFLLLEHTKKEKRIRTIEAMPLYLKDKLNTREKIEKYFEQSVDFAYEQPKVILDKIKMYSLIKVDGFYLYLTGRTGNQLSVCNAVQMSLSAGMVKYVRKISIANERYAADKEFEKDENISVQKNLELYEILKEKHLNQIYGKRPNPVGEKIEKGIEKFRSLSVRKQIYVLLQILQLSQLSNQGADLLEIGGEKKTGTSKLNKNITEKQEFKLINQSVTGLYENEIDLLRI

SEQ ID NO: 873 - protein, 1356 aa, synthetic construct
MKQKYYLGLDMGTSSLGWAVTNEKYSLLRKKGKDLWGVRLFEEAKTAADRRSYRTARRRLQREKARIGYLRELFSEEINKIDAGFFQRLEDSKYHKEDKREHQPFALFADKGYTDREYFEDYPTIFHLRKALLDIENEGKTFDVRLVYLAILNMFKHRGHFLNANLDDKSGGDLKEKIHILTSMANKLFDDISFKTVDIKDIEQILASKDYSNSTRLEKLLELFELSKTKNKVETEIFKMICGLKGTISKIFANESMDEEAQKLSFSFRDGNYDEKIVEMEEALSEESYEFIMIMKQVHDWAVLSNIMMGEEYLSVARVKAYEKHKKDLNMLKALLKNYSIKEYNSMFRIMKDNNYSSYIGSVISQETIRRKGKYTTDDFYKNVKSIVLKCEECTEKEYILSEIEKKTFLPKQNTTSNSVIPNQVHKKELKRILENAAKYLEFLNDKDDTGLTVSEKIVRLFEFQIPYYVGPLSNGVCDGKNVWSVRREKGAVLPWNFEEKIDVKQSSENFITKLVNHCTYLNGETVLPKNSLLYEKFMVLNELNNLKINGVKIGVELKQSIYNDVFKKGKKVTAKALIQYLKNIGEIDATEETVVSGIDGDFTNRLANYKKFIEIFKVPTLTYEQEQIAEDIIFYSTVYGESKKFLEERIREKYNEELSENQIKRILGLKFKDWGRLSKELLLLQGIDKQTGEISSIISKMWSDNYNLMELIATDKFSYGYNIEQKTSKIEKVLSDIEYSDLDEIYISAPVKRMVWQTILVLKELEKVMGCEPEKIFVEMARDANAPKKRTESRKKKFLELYKTCKKESRDWKEELEDTEESKFRSKKLYLYYTQKGRCMYSGEEIELKDLFNDNLYDIDAIYPRHFVKDDSIENNLVLVRKVDNAHKSDAVLESSIRNKMCGFWKILREGSFITDEKYKRLMRTDDFSDEERAGFISRQIVETRQGTKVIADLFTKTFPESEIIYVKAGNVSDFRKKFDFLKCRIVNDFHHAQDAYLNIVVGNVYNTKFTQNPMNFIREYNKDPKANKYHMDKLFEYPVSRNGRDAWVTKNAESICMVKKMMEKNTPLITRMNYESHGGIADQTIYSAEDAQKAKGKGYISIKSSDGNLLDTCKYGGMKKYTGTYFLLLEHTKKEKRIRTIEAMPLYLKDKLNTREKIEKYFEQSVDFAYEQPKVILDKIKMYSLIKVDGFYLYLTGRTGNQLSVCNAVQMSLSAGMVKYVRKISIANERYAADKEFEKDENISVQKNLELYEILKEKHLNQIYGKRPNPVGEKIEKGIEKFRSLSVRKQIYVLLQILQLSQLSNQGADLLEIGGEKKTGTSKLNKNITEKQEFKLINQSVTGLYENEIDLLRI

SEQ ID NO: 874 - protein, 1356 aa, synthetic construct
MKQKYYLGLAMGTSSLGWAVTNEKYSLLRKKGKDLWGVRLFEEAKTAADRRSYRTARRRLQREKARIGYLRELFSEEINKIDAGFFQRLEDSKYHKEDKREHQPFALFADKGYTDREYFEDYPTIFHLRKALLDIENEGKTFDVRLVYLAILNMFKHRGHFLNANLDDKSGGDLKEKIHILTSMANKLFDDISFKTVDIKDIEQILASKDYSNSTRLEKLLELFELSKTKNKVETEIFKMICGLKGTISKIFANESMDEEAQKLSFSFRDGNYDEKIVEMEEALSEESYEFIMIMKQVHDWAVLSNIMMGEEYLSVARVKAYEKHKKDLNMLKALLKNYSIKEYNSMFRIMKDNNYSSYIGSVISQETIRRKGKYTTDDFYKNVKSIVLKCEECTEKEYILSEIEKKTFLPKQNTTSNSVIPNQVHKKELKRILENAAKYLEFLNDKDDTGLTVSEKIVRLFEFQIPYYVGPLSNGVCDGKNVWSVRREKGAVLPWNFEEKIDVKQSSENFITKLVNHCTYLNGETVLPKNSLLYEKFMVLNELNNLKINGVKIGVELKQSIYNDVFKKGKKVTAKALIQYLKNIGEIDATEETVVSGIDGDFTNRLANYKKFIEIFKVPTLTYEQEQIAEDIIFYSTVYGESKKFLEERIREKYNEELSENQIKRILGLKFKDWGRLSKELLLLQGIDKQTGEISSIISKMWSDNYNLMELIATDKFSYGYNIEQKTSKIEKVLSDIEYSDLDEIYISAPVKRMVWQTILVLKELEKVMGCEPEKIFVEMARDANAPKKRTESRKKKFLELYKTCKKESRDWKEELEDTEESKFRSKKLYLYYTQKGRCMYSGEEIELKDLFNDNLYDIDAIYPRHFVKDDSIENNLVLVRKVDNAHKSDAVLESSIRNKMCGFWKILREGSFITDEKYKRLMRTDDFSDEERAGFISRQIVETRQGTKVIADLFTKTFPESEIIYVKAGNVSDFRKKFDFLKCRIVNDFHHAQDAYLNIVVGNVYNTKFTQNPMNFIREYNKDPKANKYHMDKLFEYPVSRNGRDAWVTKNAESICMVKKMMEKNTPLITRMNYESHGGIADQTIYSAEDAQKAKGKGYISIKSSDGNLLDTCKYGGMKKYTGTYFLLLEHTKKEKRIRTIEAMPLYLKDKLNTREKIEKYFEQSVDFAYEQPKVILDKIKMYSLIKVDGFYLYLTGRTGNQLSVCNAVQMSLSAGMVKYVRKISIANERYAADKEFEKDENISVQKNLELYEILKEKHLNQIYGKRPNPVGEKIEKGIEKFRSLSVRKQIYVLLQILQLSQLSNQGADLLEIGGEKKTGTSKLNKNITEKQEFKLINQSVTGLYENEIDLLRI

SEQ ID NO: 875 - protein, 1421 aa, synthetic construct
MDKKPPYYIGLACGTNSVGWAVSDKNYHLLKGTHHIKTEKGTKTKKQTLWGFRLFEEAETAAERRIHRSARRRAERAKNRLKLLRMLFHDEIVQVDPEFYQRLKESFYLLDDKKLQKNSKNTLFNDSNLTDKDFHKKYPTIWHLRQAIINAKDDEAFDIRLYFLAIQHILKHRGHFLMEGEINSDGDVDFESIFENFRCEAERVGYNIADVPAEVKELLMQKMSKTDKKKSLKDILYIEGDELDDDVPKGQLELAGLLVGSKVDLKKIFSINDDEKFPYSFSEGAFEDKLPDIEMTVGSENLDLIFAAKKIYDYVTLDNLLAGNKLISDAMVANYNQHSNDLKKLKQVFRPHREVYDKLFKTKLYNEKFPSYDAYISKAYTEDKSGRKSSKNIGQEDFNKHLHKLLEEIKTKTKPELDSLVDELLDRTDTSEKSVSPLLLPKQRGQAKGTIPQQLHGKELKYILQKLQKDYPSFAEVTPGEDESCNTKAKKIIKIHEFRIPYYCGPIVKRKFDDDGKQVANGKSQFSWADEEIAELVYPWNFDKLIKKEQRANNFIRRMTNECTHLVGEDVLPKCSLIYQKYMILNELNNLKINGYRIDNQLKQQIFERGYKNNEIKGNITLKKLEKWCKDNALISINDEMSGTSEVKTLPKYQTYQDFSRILGTDFAHKYSANKLEKVVESITVLGDEKSMLKQSIQEILNCDAKTANSLSKLSYKDWGRMSAKFLNGITVNDRTILDYLWEDNKNLMELLGQEVGFGKIVEEYNKSKRPVTNRITYHDVESLYCSPAVKRSVWQTIRIVDELVKNLQYAPEKIFLEVTRGEDKNAKGKYTLARRKDLETKLKAVKTDDARAILKELDGYEDRDLQSKKLFLYFSQMGKCAYSGEPISLEELNNSQLYDIDHIYPRSKTKDDSITRNLVLVKANLNREKTNNYPISDTIRNKMHGIWSVWYHQGLITKEKYERLTRATPLTNDELGSFIARQLVETSQSVKAIRDLLKQAYPKTKIVMVKAGQVSNFRHLMSRDKKDRDGNIYEPGKPEFIKVREINDLHHAKDAYLNIVVGNVMNETFTDNPNEWIKRRAGKEYSINPERIFRASKTYRKANGEETSYPEVNGWNFAESIQAVSNTMRRNDVIWTRMNYIESGEISDLQLVGKSNKADGLLRIKQQERLDPKKYGGYNSLKGAHFALIECKDKKGNLQRCIVQIPIIAKNNIENYIAENYTDAQVILPIIKYKSLLKADGLLLTISNKDSDLKNGYQHAVQAKFQQSISPYLKTICSICAKDKLARNNYQISTEDNVNVEHNLQLFDEFCDKMKIYSGYPELAGGIEKIMLSRTTFSELDLKQQCLTLGQMMFIFACKAQNAKLNTIGCGDSVGRIRISNNKLFSYNNLHLINQSPTGLYEEVIDLKTVRPKVNKQDRE

SEQ ID NO: 876 - protein, 1421 aa, synthetic construct
MDKKPPYYIGLDCGTNSVGWAVSDKNYHLLKGTHHIKTEKGTKTKKQTLWGFRLFEEAETAAERRIHRSARRRAERAKNRLKLLRMLFHDEIVQVDPEFYQRLKESFYLLDDKKLQKNSKNTLFNDSNLTDKDFHKKYPTIWHLRQAIINAKDDEAFDIRLYFLAIQHILKHRGHFLMEGEINSDGDVDFESIFENFRCEAERVGYNIADVPAEVKELLMQKMSKTDKKKSLKDILYIEGDELDDDVPKGQLELAGLLVGSKVDLKKIFSINDDEKFPYSFSEGAFEDKLPDIEMTVGSENLDLIFAAKKIYDYVTLDNLLAGNKLISDAMVANYNQHSNDLKKLKQVFRPHREVYDKLFKTKLYNEKFPSYDAYISKAYTEDKSGRKSSKNIGQEDFNKHLHKLLEEIKTKTKPELDSLVDELLDRTDTSEKSVSPLLLPKQRGQAKGTIPQQLHGKELKYILQKLQKDYPSFAEVTPGEDESCNTKAKKIIKIHEFRIPYYCGPIVKRKFDDDGKQVANGKSQFSWADEEIAELVYPWNFDKLIKKEQRANNFIRRMTNECTHLVGEDVLPKCSLIYQKYMILNELNNLKINGYRIDNQLKQQIFERGYKNNEIKGNITLKKLEKWCKDNALISINDEMSGTSEVKTLPKYQTYQDFSRILGTDFAHKYSANKLEKVVESITVLGDEKSMLKQSIQEILNCDAKTANSLSKLSYKDWGRMSAKFLNGITVNDRTILDYLWEDNKNLMELLGQEVGFGKIVEEYNKSKRPVTNRITYHDVESLYCSPAVKRSVWQTIRIVDELVKNLQYAPEKIFLEVTRGEDKNAKGKYTLARRKDLETKLKAVKTDDARAILKELDGYEDRDLQSKKLFLYFSQMGKCAYSGEPISLEELNNSQLYDIDAIYPRSKTKDDSITRNLVLVKANLNREKTNNYPISDTIRNKMHGIWSVWYHQGLITKEKYERLTRATPLTNDELGSFIARQLVETSQSVKAIRDLLKQAYPKTKIVMVKAGQVSNFRHLMSRDKKDRDGNIYEPGKPEFIKVREINDLHHAKDAYLNIVVGNVMNETFTDNPNEWIKRRAGKEYSINPERIFRASKTYRKANGEETSYPEVNGWNFAESIQAVSNTMRRNDVIWTRMNYIESGEISDLQLVGKSNKADGLLRIKQQERLDPKKYGGYNSLKGAHFALIECKDKKGNLQRCIVQIPIIAKNNIENYIAENYTDAQVILPIIKYKSLLKADGLLLTISNKDSDLKNGYQHAVQAKFQQSISPYLKTICSICAKDKLARNNYQISTEDNVNVEHNLQLFDEFCDKMKIYSGYPELAGGIEKIMLSRTTFSELDLKQQCLTLGQMMFIFACKAQNAKLNTIGCGDSVGRIRISNNKLFSYNNLHLINQSPTGLYEEVIDLKTVRPKVNKQDRE

SEQ ID NO: 877 - protein, 1421 aa, synthetic construct
MDKKPPYYIGLACGTNSVGWAVSDKNYHLLKGTHHIKTEKGTKTKKQTLWGFRLFEEAETAAERRIHRSARRRAERAKNRLKLLRMLFHDEIVQVDPEFYQRLKESFYLLDDKKLQKNSKNTLFNDSNLTDKDFHKKYPTIWHLRQAIINAKDDEAFDIRLYFLAIQHILKHRGHFLMEGEINSDGDVDFESIFENFRCEAERVGYNIADVPAEVKELLMQKMSKTDKKKSLKDILYIEGDELDDDVPKGQLELAGLLVGSKVDLKKIFSINDDEKFPYSFSEGAFEDKLPDIEMTVGSENLDLIFAAKKIYDYVTLDNLLAGNKLISDAMVANYNQHSNDLKKLKQVFRPHREVYDKLFKTKLYNEKFPSYDAYISKAYTEDKSGRKSSKNIGQEDFNKHLHKLLEEIKTKTKPELDSLVDELLDRTDTSEKSVSPLLLPKQRGQAKGTIPQQLHGKELKYILQKLQKDYPSFAEVTPGEDESCNTKAKKIIKIHEFRIPYYCGPIVKRKFDDDGKQVANGKSQFSWADEEIAELVYPWNFDKLIKKEQRANNFIRRMTNECTHLVGEDVLPKCSLIYQKYMILNELNNLKINGYRIDNQLKQQIFERGYKNNEIKGNITLKKLEKWCKDNALISINDEMSGTSEVKTLPKYQTYQDFSRILGTDFAHKYSANKLEKVVESITVLGDEKSMLKQSIQEILNCDAKTANSLSKLSYKDWGRMSAKFLNGITVNDRTILDYLWEDNKNLMELLGQEVGFGKIVEEYNKSKRPVTNRITYHDVESLYCSPAVKRSVWQTIRIVDELVKNLQYAPEKIFLEVTRGEDKNAKGKYTLARRKDLETKLKAVKTDDARAILKELDGYEDRDLQSKKLFLYFSQMGKCAYSGEPISLEELNNSQLYDIDAIYPRSKTKDDSITRNLVLVKANLNREKTNNYPISDTIRNKMHGIWSVWYHQGLITKEKYERLTRATPLTNDELGSFIARQLVETSQSVKAIRDLLKQAYPKTKIVMVKAGQVSNFRHLMSRDKKDRDGNIYEPGKPEFIKVREINDLHHAKDAYLNIVVGNVMNETFTDNPNEWIKRRAGKEYSINPERIFRASKTYRKANGEETSYPEVNGWNFAESIQAVSNTMRRNDVIWTRMNYIESGEISDLQLVGKSNKADGLLRIKQQERLDPKKYGGYNSLKGAHFALIECKDKKGNLQRCIVQIPIIAKNNIENYIAENYTDAQVILPIIKYKSLLKADGLLLTISNKDSDLKNGYQHAVQAKFQQSISPYLKTICSICAKDKLARNNYQISTEDNVNVEHNLQLFDEFCDKMKIYSGYPELAGGIEKIMLSRTTFSELDLKQQCLTLGQMMFIFACKAQNAKLNTIGCGDSVGRIRISNNKLFSYNNLHLINQSPTGLYEEVIDLKTVRPKVNKQDRE

SEQ ID NO: 878-880 - skipped (3 entries)

SEQ ID NO: 881 - protein, 9 aa, synthetic construct
MAPKKKRKV

SEQ ID NO: 882 - protein, 16 aa, synthetic construct
KRPAATKKAGQAKKKK

SEQ ID NO: 883 - protein, 8 aa, synthetic construct
DYKDDDDK

SEQ ID NO: 884 - skipped

SEQ ID NO: 885 - RNA, 20 nt, synthetic construct
  source 1..20: mol_type = other RNA
gtgagccactgtgcctggcc

SEQ ID NO: 886 - DNA, 54 bp, synthetic construct
  source 1..54: mol_type = other DNA
  modified_base 1: mod_base = OTHER; note = phosphorylation modification
  modified_base 51..54: mod_base = OTHER; note = Phosphorothioate linkage
acttcggtacgcgtcgacgtacggtcgacgagtcgcgcgtacgacgatcgagac

SEQ ID NO: 887 - DNA, 54 bp, synthetic construct
  source 1..54: mol_type = other DNA
  modified_base 1: mod_base = OTHER; note = phosphorylation modification
  modified_base 51..54: mod_base = OTHER; note = Phosphorothioate linkage
gtctcgatcgtcgtacgcgcgactcgtcgaccgtacgtcgacgcgtaccgaagt

SEQ ID NO: 888 - DNA, 42 bp, synthetic construct
  source 1..42: mol_type = other DNA
  modified_base 1..4: mod_base = OTHER; note = Phosphorothioate linkage
aactacacgacgctcttccgatctnnnwnnnwnnagtgacac

SEQ ID NO: 889 - DNA, 48 bp, synthetic construct
  source 1..48: mol_type = other DNA
  modified_base 48: mod_base = OTHER; note = phosphorylation modification
nnnnnngtgtcactnnwnnnwnnnagatcggaagagcgtcgtgtagtt

SEQ ID NO: 890 - DNA, 18 bp, synthetic construct
  source 1..18: mol_type = other DNA
gtcgacgagtcgcgcgta

SEQ ID NO: 891 - DNA, 18 bp, synthetic construct
  source 1..18: mol_type = other DNA
tcgtcgaccgtacgtcga

SEQ ID NO: 892 - DNA, 52 bp, synthetic construct
  source 1..52: mol_type = other DNA
  modified_base 49..52: mod_base = OTHER; note = Phosphorothioate linkage
gtgactggagttcagacgtgtgctcttccgatctcgcgcgtacgacgatcga

SEQ ID NO: 893 - DNA, 54 bp, synthetic construct
  source 1..54: mol_type = other DNA
  modified_base 51..54: mod_base = OTHER; note = Phosphorothioate linkage
gtgactggagttcagacgtgtgctcttccgatctatcgcgcgtacgacgatcga

SEQ ID NO: 894 - DNA, 55 bp, synthetic construct
  source 1..55: mol_type = other DNA
  modified_base 52..55: mod_base = OTHER; note = Phosphorothioate linkage
gtgactggagttcagacgtgtgctcttccgatcttaacgcgcgtacgacgatcga

SEQ ID NO: 895 - DNA, 52 bp, synthetic construct
  source 1..52: mol_type = other DNA
  modified_base 49..52: mod_base = OTHER; note = Phosphorothioate linkage
gtgactggagttcagacgtgtgctcttccgatcttacgtcgacgcgtaccga

SEQ ID NO: 896 - DNA, 54 bp, synthetic construct
  source 1..54: mol_type = other DNA
  modified_base 51..54: mod_base = OTHER; note = Phosphorothioate linkage
gtgactggagttcagacgtgtgctcttccgatctgctacgtcgacgcgtaccga

SEQ ID NO: 897 - DNA, 55 bp, synthetic construct
  source 1..55: mol_type = other DNA
  modified_base 52..55: mod_base = OTHER; note = Phosphorothioate linkage
gtgactggagttcagacgtgtgctcttccgatctatgtacgtcgacgcgtaccga

SEQ ID NO: 898 - DNA, 70 bp, synthetic construct
  source 1..70: mol_type = other DNA
aatgatacggcgaccaccgagatctacacnnnnnnnnacactctttccctacacgacgctcttccgatct

SEQ ID NO: 899 - DNA, 66 bp, synthetic construct
  source 1..66: mol_type = other DNA
caagcagaagacggcatacgagatnnnnnnnngtgactggagttcagacgtgtgctcttccgatct

SEQ ID NO: 900 - skipped

SEQ ID NO: 901 - RNA, 20 nt, synthetic construct
  source 1..20: mol_type = other RNA
tgcgacgggtgtggtacgca

SEQ ID NO: 902 - DNA, 140 bp, synthetic construct
  source 1..140: mol_type = other DNA
tgcgacgggtgtggtacgcagtttgagaaccttgtaaattagaaataatttacaaggtgagttcaaataaggatttatccgaaatcgccgaaatggcccacattgtgtggataaaaaagactttattacaaagtcttttt

SEQ ID NO: 903 - RNA, 140 nt, synthetic construct
  source 1..140: mol_type = other RNA
tgcgacgggtgtggtacgcagtttgagaaccttgtaaattagaaataatttacaaggtgagttcaaataaggatttatccgaaatcgccgaaatggcccacattgtgtggataaaaaagactttattacaaagtcttttt

SEQ ID NO: 904 - DNA, 98 bp, synthetic construct
  source 1..98: mol_type = other DNA
acgggtgtggtacgcagccactgttttagtactctggaaacagaatctactaaaacaaggcaaaatgccgtgtttatctcgtcaacttgttggcgaga

SEQ ID NO: 905 - RNA, 98 nt, synthetic construct
  source 1..98: mol_type = other RNA
acgggtgtggtacgcagccactgttttagtactctggaaacagaatctactaaaacaaggcaaaatgccgtgtttatctcgtcaacttgttggcgaga

SEQ ID NO: 906 - DNA, 3258 bp, synthetic construct
  source 1..3258: mol_type = other DNA
atggccccaaagaagaagcggaaggtcaagcggaactacatcctgggcctggacatcggcatcaccagcgtgggctacggcatcatcgactacgagacacgggacgtgatcgatgccggcgtgcggctgttcaaagaggccaacgtggaaaacaacgagggcaggcggagcaagagaggcgccagaaggctgaagcggcggaggcggcatagaatccagagagtgaagaagctgctgttcgactacaacctgctgaccgaccacagcgagctgagcggcatcaacccctacgaggccagagtgaagggcctgagccagaagctgagcgaggaagagttctctgccgccctgctgcacctggccaagagaagaggcgtgcacaacgtgaacgaggtggaagaggacaccggcaacgagctgtccaccaaagagcagatcagccggaacagcaaggccctggaagagaaatacgtggccgaactgcagctggaacggctgaagaaagacggcgaagtgcggggcagcatcaacagattcaagaccagcgactacgtgaaagaagccaaacagctgctgaaggtgcagaaggcctaccaccagctggaccagagcttcatcgacacctacatcgacctgctggaaacccggcggacctactatgagggacctggcgagggcagccccttcggctggaaggacatcaaagaatggtacgagatgctgatgggccactgcacctacttccccgaggaactgcggagcgtgaagtacgcctacaacgccgacctgtacaacgccctgaacgacctgaacaatctcgtgatcaccagggacgagaacgagaagctggaatattacgagaagttccagatcatcgagaacgtgttcaagcagaagaagaagcccaccctgaagcagatcgccaaagaaatcctcgtgaacgaagaggatattaagggctacagagtgaccagcaccggcaagcccgagttcaccaacctgaaggtgtaccacgacatcaaggacattaccgcccggaaagagattattgagaacgccgagctgctggatcagattgccaagatcctgaccatctaccagagcagcgaggacatccaggaagaactgaccaatctgaactccgagctgacccaggaagagatcgagcagatctctaatctgaagggctataccggcacccacaacctgagcctgaaggccatcaacctgatcctggacgagctgtggcacaccaacgacaaccagatcgctatcttcaaccggctgaagctggtgcccaagaaggtggacctgtcccagcagaaagagatccccaccaccctggtggacgacttcatcctgagccccgtcgtgaagagaagcttcatccagagcatcaaagtgatcaacgccatcatcaagaagtacggcctgcccaacgacatcattatcgagctggcccgcgagaagaactccaaggacgcccagaaaatgatcaacgagatgcagaagcggaaccggcagaccaacgagcggatcgaggaaatcatccggaccaccggcaaagagaacgccaagtacctgatcgagaagatcaagctgcacgacatgcaggaaggcaagtgcctgtacagcctggaagccatccctctggaagatctgctgaacaaccccttcaactatgaggtggaccacatcatccccagaagcgtgtccttcgacaacagcttcaacaacaaggtgctcgtgaagcaggaagaaaacagcaagaagggcaaccggaccccattccagtacctgagcagcagcgacagcaagatcagctacgaaaccttcaagaagcacatcctgaatctggccaagggcaagggcagaatcagcaagaccaagaaagagtatctgctggaagaacgggacatcaacaggttctccgtgcagaaagacttcatcaaccggaacctggtggataccagatacgccaccagaggcctgatgaacctgctgcggagctacttcagagtgaacaacctggacgtgaaagtgaagtccatcaatggcggcttcaccagctttctgcggcggaagtggaagtttaagaaagagcggaacaaggggtacaagcaccacgccgaggacgccctgatcattgccaacgccgatttcatcttcaaagagtggaagaaactggacaaggccaaaaaagtgatggaaaaccagatgttcgaggaaaagcaggccgagagcatgcccgagatcgaaaccgagcaggagtacaaagagatcttcatcaccccccaccagatcaagcacattaaggacttcaaggactacaagtacagccaccgggtggacaagaagcctaatagagagctgattaacgacaccctgtactccacccggaaggacgacaagggcaacaccctgatcgtgaacaatctgaacggcctgtacgacaaggacaatgacaagctgaaaaagctgatcaacaagagccccgaaaagctgctgatgtaccaccacgacccccagacctaccagaaactgaagctgattatggaacagtacggcgacgagaagaatcccctgtacaagtactacgaggaaaccgggaactacctgaccaagtactccaaaaaggacaacggccccgtgatcaagaagattaagtattacggcaacaaactgaacgcccatctggacatcaccgacgactaccccaacagcagaaacaaggtcgtgaagctgtccctgaagccctacagattcgacgtgtacctggacaatggcgtgtacaagttcgtgaccgtgaagaatctggatgtgatcaaaaaagaaaactactacgaagtgaatagcaagtgctatgaggaagctaagaagctgaagaagatcagcaaccaggccgagtttatcgcctccttctacaacaacgatctgatcaagatcaacggcgagctgtatagagtgatcggcgtgaacaacgacctgctgaaccggatcgaagtgaacatgatcgacatcacctaccgcgagtacctggaaaacatgaacgacaagaggccccccaggatcattaagacaatcgcctccaagacccagagcattaagaagtacagcacagacattctgggcaacctgtatgaagtgaaatctaagaagcaccctcagatcatcaaaaagggcaaaaggccggcggccacgaaaaaggccggccaggcaaaaaagaaaaaggactacaaggacgacgacgacaagtga

SEQ ID NO: 907 - DNA, 26 bp, synthetic construct
  source 1..26: mol_type = other DNA
agcacatgggaatttcacagnrranh

SEQ ID NO: 908 - DNA, 26 bp, synthetic construct
  source 1..26: mol_type = other DNA
agcacatgggaatttcacagggaaaa

SEQ ID NO: 909 - DNA, 26 bp, synthetic construct
  source 1..26: mol_type = other DNA
ctgggctgttctaactgcagnrranh

SEQ ID NO: 910 - DNA, 26 bp, synthetic construct
  source 1..26: mol_type = other DNA
ctgggctgttctaactgcagggaaaa

SEQ ID NO: 911 - DNA, 26 bp, synthetic construct
  source 1..26: mol_type = other DNA
gttacccaactccactctcanrhact

SEQ ID NO: 912 - DNA, 26 bp, synthetic construct
  source 1..26: mol_type = other DNA
gttacccaactccactctcaggtact

SEQ ID NO: 913 - DNA, 26 bp, synthetic construct
  source 1..26: mol_type = other DNA
agggtctgtaaggagtactgnrhact

SEQ ID NO: 914 - DNA, 26 bp, synthetic construct
  source 1..26: mol_type = other DNA
agggtctgtaaggagtactgggtact

SEQ ID NO: 915 - DNA, 30 bp, synthetic construct
  source 1..30: mol_type = other DNA
ttctagcctttgtagcacaggaaannncyh

SEQ ID NO: 916 - DNA, 30 bp, synthetic construct
  source 1..30: mol_type = other DNA
ttctagcctttgtagcacaggaaagggcct

SEQ ID NO: 917 - DNA, 30 bp, synthetic construct
  source 1..30: mol_type = other DNA
ctcccttctttgcagcacaggaaatgcccc

SEQ ID NO: 918 - DNA, 30 bp, synthetic construct
  source 1..30: mol_type = other DNA
atcagctgtattagactaaagcctnnncyh

SEQ ID NO: 919 - DNA, 30 bp, synthetic construct
  source 1..30: mol_type = other DNA
atcagctgtattagactaaagcctaggcct

SEQ ID NO: 920 - DNA, 42 bp, synthetic construct
  source 1..42: mol_type = other DNA
ttctccaatgcgacgggtgtggtacgcagccccttcgagtnn

SEQ ID NO: 921 - DNA, 42 bp, synthetic construct
  source 1..42: mol_type = other DNA
ttctccaatgcgacgggtgtggtacgcagccacttcgagtnn

SEQ ID NO: 922 - DNA, 26 bp, synthetic construct
  source 1..26: mol_type = other DNA
tgcgacgggtgtggtacgcannncct

SEQ ID NO: 923 - DNA, 26 bp, synthetic construct
  source 1..26: mol_type = other DNA
tgcgacgggtgtggtacgcagcccct

What is claimed is:

1. An engineered, non-naturally occurring Type II CRISPR-associated (Cas) protein or a polynucleotide encoding said Cas protein, wherein:
(a) the Cas protein has at least 70%, at least 75%, at least 80%, at least 85%, at least 90%, at least 92%, at least 95%, at least 98%, at least 99%, or 100% sequence identity to the amino acid sequence of SEQ ID NO: 9; or
(b) the Cas protein has at least 70%, at least 75%, at least 80%, at least 85%, at least 90%, at least 92%, at least 95%, at least 98%, at least 99%, or 100% sequence identity to the amino acid sequence of SEQ ID NO: 9, with the exception of the amino acid “M” at position 1 of the sequence.

2. The Cas protein or polynucleotide of claim 1, wherein the Cas protein is capable of recognizing a protospacer adjacent motif (PAM) having a sequence selected from NRRANH.

3. The Cas protein or polynucleotide of claim 1, wherein the Cas protein is a nickase or a dead Cas protein.

4. The Cas protein or polynucleotide of claim 3, wherein:
(a) the Cas protein has at least 70%, at least 75%, at least 80%, at least 85%, at least 90%, at least 92%, at least 95%, at least 98%, at least 99%, or 100% to the amino acid sequence of SEQ ID NO: 9, with a mutation at residue D11 or H859;
(b) the Cas protein has at least 70%, at least 75%, at least 80%, at least 85%, at least 90%, at least 92%, at least 95%, at least 98%, at least 99%, or 100% sequence identity to the amino acid sequence of SEQ ID NO: 9, with the exception of the amino acid “M” at position 1 of the sequence, and comprises a mutation at residue D11 or H859.

5. The Cas protein or polynucleotide of claim 1, wherein the mutation at residue D11 or H859 of SEQ ID NO: 9 is D11A or H859A.

6. The Cas protein or polynucleotide of claim 5, wherein the Cas protein has a sequence identity of at least 70%, at least 75%, at least 80%, at least 85%, at least 90%, at least 92%, at least 95%, at least 98%, at least 99%, or 100% to the amino acid sequence of any one of SEQ ID NOs: 869-871.

7. The Cas protein or polynucleotide of claim 1, wherein the Cas protein further comprises a sequence selected from the group consisting of: a nuclear localization signal sequence, a nuclear export signal sequence, a cell-penetrating peptide sequence, an affinity tag sequence, a deaminase sequence, a reverse transcriptase sequence, a recombinase sequence, a methyltransferase sequence, a methylase sequence, an acetylase sequence, an acetyltransferase sequence, a transcriptional activator sequence, a transcriptional repressor domain sequence, a cryptochrome sequence, a light inducible/controllable domain sequence, and a chemically inducible/controllable domain sequence.

8. The Cas protein or polynucleotide of claim 7, wherein the Cas protein comprises an amino acid sequence having at least 70%, at least 75%, at least 80%, at least 85%, at least 90%, at least 92%, at least 95%, at least 96%, at least 97%, at least 98%, at least 9 9%, or 100% sequence identity to the amino acid sequence of any one of SEQ ID NOs: 89, and 864.

9. The Cas protein or polynucleotide of claim 1, wherein the polynucleotide is a ribonucleotide sequence or a deoxyribonucleotide sequence, or analogs thereof, optionally, the polynucleotide is codon-optimized for expression in a cell of interest; preferably, the polynucleotide is an mRNA and further comprises a 5′ cap sequence and/or a poly-A tail sequence.

10. An engineered, non-naturally occurring CRISPR-Cas system comprising: a) the Type II Cas protein of claim 1 or a polynucleotide encoding the Cas protein thereof; and b) at least one engineered guide RNA or at least one engineered nucleic acid encoding the guide RNA thereof, wherein said guide RNA comprises a spacer sequence that is complementary to a target nucleic acid and a Cas protein binding segment that interacts with said Cas protein, wherein the Cas protein binding segment comprises a tracrRNA sequence and a direct repeat (DR) sequence that hybridizes to form a double-stranded RNA (dsRNA) duplex.

11. The CRISPR-Cas system of claim 10, wherein the guide RNA further comprises a linker sequence connecting the tracrRNA sequence and the DR sequence to form a sgRNA scaffold.

12. The CRISPR-Cas system of claim 11, wherein the sgRNA scaffold comprises a sequence having at least 70%, at least 75%, at least 80%, at least 85%, at least 88%, at least 90%, at least 92%, at least 94%, at least 95%, at least 96%, at least 98%, at least 99% or 100% identity to any one of SEQ ID NOs: 465-472.

13. The CRISPR-Cas system of claim 10, wherein the polynucleotide encoding the Cas protein is operably linked to a promoter; optionally, the promoter is a constitutive promoter, a tissue-specific promoter, or an inducible promoter.

14. The CRISPR-Cas system of claim 13, wherein the polynucleotide encoding the Cas protein is operably linked to a promoter and is present in a vector; optionally, the vector is selected from the group consisting of: a retroviral vector, a lentiviral vector, a phage vector, an adenoviral vector, an adeno-associated virus vector, a herpes simplex virus vector and a plasmid vector.

15. A method of modifying or targeting a target DNA locus, comprising delivering to said target DNA locus with:
(a) the Cas protein or the polynucleotide encoding said Cas protein of claim 1; or
(b) a CRISPR-Cas system; wherein the CRISPR-Cas system comprises a) the Cas protein or the polynucleotide; and b) at least one engineered guide RNA or at least one engineered nucleic acid encoding the guide RNA thereof, wherein said guide RNA comprises a spacer sequence that is complementary to a target nucleic acid and a Cas protein binding segment that interacts with said Cas protein, wherein the Cas protein binding segment comprises a tracrRNA sequence and a direct repeat (DR) sequence that hybridizes to form a double-stranded RNA (dsRNA) duplex.

16. The method of claim 15, wherein said modifying or targeting a target DNA locus comprises inducing a DNA strand break, altering gene expression of one or more genes, or epigenetically modifying of said target DNA locus; optionally, the DNA strand break comprise a DNA double strand break or a DNA single strand break.

17. The method of claim 16, wherein the method is in vitro or in vivo.
